United States Patent Application Publication US 2016/0339066 A1 - sequence listing, part 2

SEQ ID NO: 15 - DNA, 201446 bp, Artificial Sequence
  Vaccinia virus GLV-1h188 genome
ttatgagaccatcaaagagagaaagagaataaaaatatttttgtaaaactttttttatgagaccatcaaagagagaaagagaataaaaatatttttgtaaaacttttttatgagaccatcaaagagagaaagagaataaaaatatttttgtaaaacttttttatgagaccatcaaagagagaaagagaataaaaatatttttgtaaaactttttttatgagaccatcaaagagagaaagagaataaaaatatttttgtaaaactttttttatgagaccatcaaagagagaaagagaataaaaatatttttgtaaaactttttttatgagaccatcaaagagagaaagagaataaaaatatttttgtaaaactttttttatgagaccatcaaagagagaaagagaataaaaatatttttgtaaaactttttttatgagaccatcaaagagagaaagagaataaaaatatttttgtaaaactttttttatgagaccatcaaagagagaaagagaataaaaatatttttgtaaaactttttttatgagaccatcaaagagagaaagagaataaaaatatttttgtaaaactttttttatgagaccatcaaagagagaaagagaataaaaatatttttgtaaaactttttttatgagaccatcaaagagagaaagagaataaaaatatttttgtaaaactttttttatgagaccatcaaagagagaaagagaataaaaatatttttgtaaaactttttttatgagaccatcaaagagagaaagagaataaaaatatttttgtaaaactttttttatgagaccatcagaaagaggtttaatatttttgtgatactctgaaaggaaataggaataggaataggaatagtgtcataatcgtatcacactattgagacagaaaaagaagaagtcgcgagaggtaactttttgtgaatgtagttaagaacatttttgttttgcaaaccggaatatagtgtccggtacacttttttaattcgtggtgtgcctgaatcgttcgattaaccctactcatccaatttcagatgaatagagttatcgattcagacacacgctttgagttttgttgaatcgatgagtgaagtatcatcggttgcaccttcagatgccgatccgtcgacatacttgaatccatccttgacctcaagttcagatgattccttgcacatgtctccgatacgaacgctaaactctagattcttgacgcattttgtatcgacgatcgttgaaccgatgatatcttcgtaactcactttcttatgagagatgttagacccgagtactggatgggtcttgatgtcgctgtctttctcttcttcgctacatctgatgtcgatagacacttcacagtctttgatcatagcaagagcttcttcatgagtgatcgcgggagagtccttaccttgtcctggggacacgctggacaatctagcattcactgtgtttccatcagcggattctgagatggatttaatctgaggacatttggtgaatccaaagttcattctcagacctccaccgatgatggagtaataagtggtaggaggatctacatcctcgactgatgtggaatcatcttctgattccacctcgggatctggatctgactcggactctgtaatttccgttacggattggcaaatcttatcattggtcggtgtttggtcttgctttgtgactttgataataacatcgattcccatatgatgtttgttttcttcttccgtacacgaggaggaggatgaggatgattgctgaagactggcaggcatagcagctgccgccaggcacatgcatgccaggacgatatattgtttcataattgctattgattgagtactgttctttatgattctacttccttaccgtgcaataaattagaatatattttctacttttacgagaaattaattattgtatttattatttatgggtgaaaaacttactataaaaagtgggtgggtttggaattagtgatcagtttatgtatatcgcaactaccgggcatatggctatcgacatcgagaacattacccacatgataagagattgtatcagtttcgtagtcttgagtattggtattactatatagtatatagatgtcgcccactagagttactgtctccgaatgcggcatgatagtatcattctttgctttcgttaactgtttggaggaagaatctttgttattgcatttaatctcgaaattcagagtgcacacctttctcctgtaaagaaacctgaagtcgctaccttattaagaacggagaagtatccatcacgaaatacgggattacagtctttatgattcatagtaatagttagttccgacgttgagatggattcgctgagaccggtagtggtcgtccgagtacacgacgtgtcgttaactggatacaggttaatttccacatcgatatagttaaacgtatttctgggtacgggttcgcatttatctgcggaagagacggtgtgagaatatgttccgagaccacacggagaacagatgacgtctccggatactccgtatcctattccacattttgtttgggaaacacatgccttgcatccggatgatcctttgagaagacaataatatccgggagagcattcacagattctattgtgagtcgtgttacacgatcgcgtcttccgttacaacttagacaagcgggtaaatgattattgcgagatgtgaaggtacccgaaccacacggcgtacatcgtgtgttagtcttgctatcgcataatctggaagcgtatgttcccggacacaaattatggcgtttgtattcgttgtctttacactttccatcggatggtgcatgcggtgctatatctcttccgtttattattatacatgagagaaacaatatatacgagtataatacggacttcatgatttaataatgtagtaatcgttgtcttgttcctgtttcctacttctccaatcatatagatattttctttctatcatggataatatttgtaatggttctttccgtacaacatactgtttagatgatattgcgcataatttccggaggcaaatacgatagtctagattgaccgatggtagactctaatttattgagtgctttgtcgacgagtttacttttacgctccatcgatagatggcactgttctatgagatcgtcgtacatgggaaatgaaatgtgactgtctgaatgtatggctttaagatagctgtgataccgtatacaggtcggtgtcggagattcgaatctctttgaggcgacttatgtcacgatgatggaatctatcttatcgaatgatatatttttcataaatacacttttatagtcctcgtttaaacagaatttactatgtagttccgcgaatgactcgtcccttaataggcagtaggctagtatcttttttacgtagtaatcgtcgtagggagagacatcttgtagaacaacgatttcgttttgttttctcttctgtaactgcttttctggatggccgtattgattatcgagcgtgatactcgctccatattccaataaccgctttgcaaattgtatattattgacatcgaccgcgtaatatagtagagttatcgatcatatctatatcatccatgtacttgcttagtatatcaaatacatctatcagtatggtttcataacagtgatacccgcaattattaaatctcgataatatcagaccgtacatacatagacggccattgttcgatacgtgatttacagccgcgtgtccatattttccacgataaaccttacgacgtttacatcgacgagattattattaacaaagtagtcgtgtagaggatagttgttgtccgttatctaacatgcatcgaacgaccatatcgccgtaatgtaagtagtttatcagtatggcttgtacgatggattcatcctgttgtctaaatctctttagaatgttatcgatgatgtagtggttatattctctggaatcgtacgaagtaatactacgcattacgtcgacaagagtatgacgtctctcaataagaagattaacgatttccatgtctacattatatggggttactctaaatcgcttgtttagataatacgcctctaatatagggctgacgtcgtatactctacacgtgtccacatcctttattaataataatttaacaatctctatatctatggttgagaaagaccagtagtattggatgggtaaagatcctccttcgtctctgccatggatggaaacattgttatcgatcaaacatttaattacatccttggatagagattgagattctctatgagacgatatatagtaatgaagagagttcttacacatatcactgtcgtacatacaggtacgaaatacgtaaccggtgctgtaacattctgatttaagaagccatagcaatacttctggtctcggattaggcgtcgttacgtatatatccaccaatccgagaccattgattgcataattcgtattcttggacggacgtatccgtttatccacaattaggtattttagcagacgtaagtcgatattatccgaatacagatcgaaatcatttatattcgacttgagttcgttagaggaatttgaatagctggatatcagtagatgcacaatctgagattttacgtatctatgcttactgtatactcctagcggagttaatccttcgttgtttctacaaagtctctcgactccgcgagagaacaatcttaatgtctgtatcgcatttattggagacgtaacaatgtagcgcattgtttcctcgtctatctatatgttttgataagttgtgacacgtttcaatttctagttttatttttttgtacgtcacatcttcatccagtagacgacatagaatagtgcactctctaccacaataatccatagctattctggtgctaattattcctatttcacgaaggcaatcattcctcataagatgataaaaagtgtagtggagatttagtatttagcagtgcggatatgatccaagagggtgagatagtcgttctcgttcagaatctttcgcagcataagtagtatgtcgatatacttatcgttgaagactctttataaaagtctatttgtttatatttattgcggatagcagtatttccctataaaaagtatacgtcctgtggtgtctttaatcatgtacatgaatggatggtttatgtagaccttcgtacgatataccatcgaaaagttaatcgtaaatactcctgtaacggccgatgcttctgtatactcctcattaacatctataaacgtcgtatgtagaaatttttctacagtgatagtttcattacacatcttgctaaaatctgcataatatccgaatatattagtaagtcctaaattttctaaaatcggtaccagattatacggttctgtcatttccactttaaactttggcatatacaagtctatacttttagtagataacataccacaccattttttaaatttttcatctgttatatttttttctatgttatatataccttctatgtcgtccggtagtataattaccatactagagtttccctcgtatggaatatcgataatagagaatcctccgaataattcattaatatgtacatattgcaagttattctcggtacccaccatcatatcaacgctggtaactatattcttagaaatataaaacttgtctgtatatgtaagatgtttagaaaatggatatttccacattgctttaaaatggacggcgctaacaactgtcatacgagtattaatggatagcggactagtcaataaggaattaattttaccatttgtcattgtcttaacccattcgttgattagttcctttgtttggttagcattattaaagtttacagtttgaaaatcgtcttttattttttgtaggaaggaggcgtggaactcgatactatcgctaccgtatattttatttgcggtagctagtgtcgcacaatacggaatatctacctccatgtcatcattattgtcatcgggtgtattctcattcatattctctatatattttgatagttgttcagctgtagaaccagctgctccatgatttagaatagataaagtagataaaatggaaactggagaaatcaaaacattttcatcagggtgttttaagattagttctttaaagatatccatggtatagacctaacgataacgatatatatcataaataaataatgttaaatttcaatttatgtttgtaccccgtattcatacttaacaaattggtattgcgtacacaatcaatcatattacataccattaataatgcaagcataaaaaattgttagtagatgtttctaaatataggttccgtaagcaaagaatataagaatgaagcggtaatgataaaatcaatcgttatctaaaatgatcatactcatttattttattctattatattaacacatacatttttaacagcaacacattcaatattgtattgttatttttatattatttacacaattaacaatatattattagtttatattactgaattaataatataaaattcccaatcttgtcataaacacacactgagaaacagcataaacacagaatccatcaaaaatgttgataaattatctgatgttgttgttcgctgctatgataatcagatcattcgccgatagtggtaacgctatcgaaacgacattgccagaaattacaaacgctacaacagatattccagctatcagattatgcggtccagagggagatggatattgtttacacggtgactgtatccacgctagagatattgacggtatgtattgtagatgctctcatggttatacaggcattagatgtcagcatgtagtattagtagactatcaacgttcagaaaacccaaacactacaacgtcatatatcccatctcccggtattatgcttgtattagtaggcattattatgtgttgtctattatctgtttataggttcactcgacgaactaaactacctatacaagatatggttgtgccataatttttataaatttttttatgagtatttttacaaaaatgtataaagtgtatgtcttatgtatatttataaaaatgctaagtatgcgatgtatctatgttatttgtatttatctaaacaatacctctacctctagatattatacaaaaattttttatttcggcatattaaagtaaaatctagttaccttgaaaatgaatacagtgggtggttccgtatcaccagtaagaacataatagtcaaatacagtatccgattgagattttgcatacaatactagtctagaaagaaatttgtaatcatcttctgtgacgggagtccatatatctgtatcatcgtctagtttatcagtgtcccatgctatattcctgttatcatcattagttaatgaaaataactctcgtgcttcagaaaagtcaaatattgtatccatacatacatctccaaaactatcgcttatacgtttatctttaacgatacctatacctagatggttatttactaacagacattttccagatctattgactataactcctatagtttccacatcaaccaagtaatgatcatctattgttatataacaataacataactcttttccatttttatcagtatgtatatctatatcaacgtcgtcgttgtagtgaatagtagtcattgatctattatatgaaacggatatgtctagaacggcaattgttttacgtccagttaacactttcgttgatttaaagtctagagtctttgcaaacataatatccttatccgactttatatttcctgtagggtggtataattttattttgcctccacatatcggtgtttccaaatatattactagacaatattccatatagttattagttaagggtacccaattagaacacgtacgcttattatcatcatttggatcgtatttcataaaagttattgtgttatcgatgtcaacacattctacattttttaatcgtctatatagtatttttctgatattttctataatatcagaattgtcttccatcggaagttgtatactatcggaatcagttacatgtttaaataattctctgatgtcattccttatacaatcaaattcattattaaacagtttaatagtctgtagacctttatcgtcgtaaatatccattgtcttattagttacgcttatttttatgtgtttttacgttgctttattatattttataagaatgattgtttgacgaatcacgagaactattaagacacattattaggtatatattataaaaaagtttttgattacgatgttataagaggaaagaggacacattaacatcatacatcaattaactacattcttataacatcgtaatcaaaagaattgcaattttgatgtataacaactgtcaatgggttatggaattgtatattacatattatacggtatgttggtaacgacaaataccggtcggtaattgtctgccggtgtaatagaattatatatatctatctattacaccggccttgtatacataataataagttgtggtagtatgatctccatatttataatttaggactttgtattcagtatttttggaatcataaaaaataaaaaaaagttttactaatttaaaatttaaaaagtatttacatttttttcactgtttagtcgcggatatggaattcgatcctgccaaaatcaatacatcatctatagatcatgtaacaatattacaatacatagatgaaccaaatgatataagactaacagtatgcattatccgaaatattatatcaatatcacaaaaataaatacacatttggctaatcaatttcgggcttggaaaaaacgtatcgccggaagggactatatgactaacttatctagagatacaggaatacaacaatcaaaacttactgaaactatacgtaactgtcaaaaaaatagaaacatatatggtctatatatacactacaatttagttattaattggataaccgatgtgattatcaatcaatattaagagggttggtaaattggtacatagctaataatacctatactccaaatacacccaataatacaacaaccatttctgagttggatatcatcaaaatactaaataaatacgaggacgtgtatagagtaagtaaagaaaaagaatgtggaatttgctatgaagttgtttactcaaaacgatagatactttggtttattggattcgtgtactcatatattttgcataacatgcatcaatatatggcatagaacacgaagagaaaccggtgcgtcggataattgtcctatatgccgtacccgttttagaaacataacaatgagcaagttctataagctagttaactaataaataaaaagtttaatttgttgacgacgtatgtcgttattttttctcgtataaaagattaatttgattctaatataatctttagtattggataaatatcaattcaaattaattccattagattatatcataaataaaaatagtagcacacaactacttcagcaaacattctttttataaatgccatctagcgtagcgaggacacaagtgaacctataattatcaaatttattagtatcagtcacatgaaggactttacgtagagtgacgattccactatctgtggtacgaacggtttcatcttctttgatgccatcacccagatgttctataaacttggtatcctcgtccgatttcatatcctttgccaaccaatacatatagctaaactcaggcatatgttccacacatcctgaacaatgaaattctccagaagatgttacaatgtctagatttggacatttggtttcaaccgcgttaacatatgagtgaacacacccatacatgaaagcgatgagaaataggattctcatcttgccaaaatatcactagaaaaaatttatttatcagttttaaaggtataaaaaatacttattgttgctcgaatattttgtatttgatggtatacggaagattagaaatgtaggtattatcatcaactgattctatggttttatgtattctatcatgtttcactattgcgttggaaataatatcatatgcttccacatatattttattttgttttaactcataatactcacgtaattctggattattggcatatctatgaataattttagctccatgatcagtaaatattaatgagaacatagtattaccacctaccattatttttttcatctcattcaattcttaattgcaaagatctatataatcattatagcgttgacttatggactctggaatcttagacgatgtacagtcatctataatcatggcatatttaatacattgttttatagcatagtcgttatctacgatgttagatatttctctcaatgaatcaatcacacaatctaatgtaggtttatgacataatagcattttcagcagttcaatgtttttagattcgttgatggcaatggctatacatgtatatccgttatttgatctaatgttgacatctgaaccggattctagcagtaaagatactagagattgtttattatatctaacagccttgtgaagaagtgtttctcctcgtttgtcaatcatgttaatgtctttaagataaggtaggcaaatgtttatagtactaagaattgggcaagcataagacatgtcacaaagacccttttttgtatgtataagtgtaaaaattataacatccatagttggatttacataggtgtccaatcgggatctctccatcatcgagataattgatggcatctcccttccttttttagtagatatttcatcgtgtaagaatcaatattaatatttctaaagtatccgtgtatagcctctttatttaccacagctccatattccactagagggatatcgccgaatgtcatatactcaattagtatatgttggaggacatccgagttcattgttttcaatatcaaagagatggtttccttatcatttctccatagtggtacaatactacacattattccgtgcggctttccattttccaaaaacaatttgaccaaatctaaatctacatctttattgtatctataatcactatttagataatcagccataattcctcgagtgcaacatgttagatcgtctatatatgaataagcagtgttatctattcctttcattaacaatttaacgatgtctatatctatatgagatgacttaatataatattgaagagctgtacaatagtttttatctataaaagacggcttgattccgtgattaattagacatttaacaacttccggacgcacatatgctctcgtatccgactctgaatacagatgagagatgatatacagatgcaatacggtaccgcaatttcgtagttgataatcatcatacgcgtatcagtactcgtcctcataaagaacactgcagccattttctatgaacaaatcaataattttagaaacaggatcattgtcattacataattttctataactgaacgatggttttcacatttaacactcaagtcaaatccatgttctaccaacacctttatcaagtcaacgtctacatttttggatttcatatagctgaatatattaaagttatttatgttgctaaatccagtggcttctagtagagccatcgctatatccttattaactttaacatgtctactatttgtgtattcttctaatggggtaagctgtctccaatttttgcgtaatggattagtgccactgtctagtagtagtttgacgacctcgacattattacaatgctcattaaaaaggtatgcgtgtaaagcattattcttgaattggttcctggtatcattaggatctctgtctttcaacatctgtttaagttcatcaagagccacctcctcattttccaaatagtcaaacattttgactgaatgagctactgtgaactctatacacccacacaactaatgtcattaaatatcatgtcaaaaacttgtacaattattaataaaaataatttagtgtttaaattttaccagttccagattttacacctccgttaatacctccattaaccccactggacgatcctcctccccacattccaccgccaccagatgtataagttttagatcctttattactaccatcatgtccatggataaagacactccacatgccgccactaccccctttagaagacatattaataagacttaaggacaagtttaacaataaaattaatcacgagtaccctactaccaacctacactattatatgattatagtttctatttttacagtaccttgactaaagtttctagtcacaagagcaatactaccaacctacactattatatgattatagtttctatttttataggaacgcgtacgagaaaatcaaatgtctaatttctaacggtagtgttgataaacgattgttatccgcggatacctcctctatcatgtcgtctattttcttactttgttctattaacttattagcattatatattatttgattataaaacttatattgcttattagcccaatctgtaaatatcggattattaacatatcgtttctttgtaggtttatttaacatgtacatcactgtaagcatgtccttaccatttattttaatttgacgcatatccgcaatttctttttcgcagtcggttataaattctatatatgatggatacatgctacatgtgtacttataatcgactaatatgaagtacttgatacatattttcagtaacgatttattattaccacctatgaataagtacctgtgatcgtctaggtaatcaactgttttcttaatacattcgatggttggtaatttactcagaataatttccaatatcttaatatataattctgctatttctgggatatatttatctgccagtataacacaaatagtaatacatgtaaacccatattttgttattatattaatgtctgcgccattatctattaaccattctactaggctgacactatgcgactcaatacaatgataaagtatactacatccatgtttatctattttgtttatatcatcaatatacggcttacaaagttttagtatcgataacacatccaactcacgcatagagaaggtagggaataatggcataatatttattaggttatcatcattgtcattatctacaactaagtttccattttttaaaatatactcgacaactttaggatctctattgccaaatttttgaaaatatttatttatatgcttaaatctatataatgtagctccttcatcaatcatacatttaataacattgatgtatactgtatgataagatacatattctaacaatagatcttgtatagaatctgtatatcttttaagaattgtggatattaggatattattacataaactattacacaattctaaaatataaaacgtatcacggtcgaataatagttgatcaactatataattatcgattttgtgatttttcttcctaaactgtttacgtaaatagttagatagaatattcattagttcatgaccactatagttactatcgaataacgcgtcaaatatttcccgtttaatatcgcatttgtcaagataataatagagtgtggtatgttcacgataagtataataacgcatctctttttcgtgtgaaattaaatagtttattacgtccaaagatgtagcataaccatcttgtgacctagtaataatataataatagagaactgttttacccattctatcatcataatcagtggtgtagtcgtaatcgtaatcgtctaattcatcatcccaattataatattcaccagcacgtctaatctgttctattttgatcttgtatccatactgtatgttgctacatgtaggtattcctttatccaataatagtttaaacacatctacattgggatttgatgttgtagcgtatttttctacaatattaataccatttttgatactatttatttctatacctttcgaaattagtaatttcaataagtctatattgatgttatcagaacatagatattcgaatatatcaaaatcattgatatttttatagtcgactgacgacaataacaaaatcacaacatcgtttttgatattattatttttcttggtaacgtatgcctttaatggagtttcaccatcatactcatataatggatttgcaccactttctatcaatgattgtgcactgctggcatcgatgttaaatgttttacaactatcatagagtatcttatcgttaaccatgattggttgttgatgctatcgcattttttggtttctttcatttcagttatgtatggatttagcacgtttgggaagcatgagctcatatgatttcagtactgtagtgtcagtactattagtttcaataagatcaatctctagatctatagaatcaaaacacgataggtcagaagataatgaatatctgtaggcttcttgttgtactgtaacttctggttttgttagatggttgcatcgtgctttaacgtcaatggtacaaattttatcctcgctttgtgtatcatattcgtccctactataaaattgtatattcagattatcatgcgatgtgtatacgctaacggtatcaataaacggagcacaccatttagtcataaccgtaatccaaaaatttttaaagtatatcttaacgaaagaagttgtgtcattgtctacggtgtatggtactagatcctcataagtgtatatatctagagtaatgtttaatttattaaatggttgataatatggatcctcgtgacaatttccgaagatggaaataagacataaacacgcaataaatctaattgcggacatggttactccttaaaaaaatacgaataatcaccttggctatttagtaagtgtcatttaacactatactcatattaatccatggactcataatctctatacgggattaacggatgttctatatacggggatgagtagttctcttctttaactttatactttttactaatcatatttagactgatgtatgggtaatagtgtttgaagagctcgttctcatcatcagaataaatcaatatctctgtttttttgttatacagatgtattacagcctcatatattacgtaatagaacgtgtcatctaccttattaactttcaccgcatagttgtttgcaaatacggttaatcctttgacctcgtcgatttccgaccaatctgggcgtataatgaatctaaactttaattgcttgtaatcattcgaaataatttttagtttgcatccgtagttatcccctttatgtaactgtaaatttctcaacgcgatatctccattaataatgatgtcgaattcgtgctgtatacccatactgaatggatgaacgaataccgacggcgttaatagtaatttactttttcatctttacatattgggtactagttttactatcataagtttataaattccacaagctactatggaataagccaaccatcttagtataccacacatgtcttaaagtttattaattaattacatgttgttttatatatatcgctacgaatttaaagagaaattagtttaggaagaaaaattatctatctacatcatcacgtctctgtattctacgatagagtgctactttaagatgcgacagatccgtgtcatcaaatatatactccattaaaatgattattccggcagcgaacttgatattggatatatcacaacctttgttaatatctacgacaatagacagcagtcccatggttccataaacagtgagtttatctttctttgaagagatattttgtagagatcttataaaactgtcgaatgacatcgcatttatatctttagctaaatcgtatatgttaccatcgtaatatctaaccgcgtctatcttaaacgtttccatcgctttaaagacgtttccgatagatggtctcatttcatcagtcatactgagccaacaaatataatcgtgtataacatctttgatagaatcagactctaaagaaaacgaatcggctttattatacgcattcatgataaacttaatgaaaaatgtttttcgttgtttaagttggatgaatagtatgtcttaataattgttattatttcattaattaatatttagtaacgagtacactctataaaaacgagaatgacataactaatcataactagttatcaaagtgtctaggacgcgtaattttcatatggtatagatcctgtaagcattgtctgtattctggagctattttctctatcgcattagtgagttcagaatatgttataaatttaaatcgaataacgaacataactttagtaaagtcgtctatattaactcttttattttctagccatcgtaataccatgtttaagatagtatattctctagttactacgatctcatcgttgtctagaatatcacatactgaatctacatccaattttagaaattggtctgtgttacatatctcttctatattattgttgatgtattgtcgtagaaaactattacgtagaccattttctttataaaacgaatatatagtactccaattatctttaccgatatatttgcacacataatccattctctcaatcactacatctttaagattttcgttgttaagatatttggctaaactatataattctattagatcatcaacagaatcagtatatatttttctagatccaaagacgaactctttggcgtcctctataatattcccagaaaagatattttcgtgttttagtttatcgagatctgatctgttcatatacgccatgattgtacggtacgttatgataaccgcataaaataaaaatccattttcatttttaaccaatactattcataattgagattgatgtaatactttgttactttgaacgtaaagacagtacacggatccgtatctccaacaagcacgtagtaatcaaatttggtgttgttaaacttcgcaatattcatcaatttagatagaaacttatactcatcatctgttttaggaatccatgtattattaccactttccaacttatcattatcccaggctatgtttcgtccatcatcgttgcgcagagtgaataattcttttgtattcggtagttcaaatatatgatccatgcatagatcggcaaagctattgtagatgtgatttttcctaaatctaatataaaactcgtttactagcaaacactttcctgatttatcgaccaagacacatatggtttctaaatctatcaagtggtggggatccatagttatgacgcagtaacatatattattacattcttgactgtcgctaatatctaaatatttattgttatcgtattggattctgcatatagatggcttgtatgtcaaagatatagaacacataaccaatttatagtcgcgctttacattctcgaatctaaagttaagagatttagaaaacattatatcctcggatgatgttatcactgtttctggagtaggatatattaaagtctttacagatttcgtccgattcaaataaatcactaaataatatcccacattatcatctgttagagtagtatcattaaatctattatattttatgaaagatatatcactgctcacctctatatttcgtacatttttaaactgtttgtataatatctctctgatacaatcagatatatctattgtgtcggtagacgataccgttacatttgaattaatggtgttccattttacaacttttaacaagttgaccaattcatttctaatagtatcaaactctccatgattaaatattttaatagtatccattttatatcactacggacacaaagtagctgacataaaccattgtataatttttatgttttatgtttattagcgtacacattttggaagttccggcttccatgtatttcctggagagcaagtagatgatgaggaaccagatagtttatatccgtacttgcacttaaagtctacattgtcgttgtatgagtatgatcttttaaacccgctagacaagtatccgtttgatattgtaggatgtggacatttaacaatctgacacgtgggtggatcggaccattctcctcctgaacacaggacactagagttaccaatcaacgaatatccactattgcaactataagttacaacgctcccatcggtataaaaatcctcgtatccgttatgtcttccgttggatatagatggaggggattggcatttaacagattcacaaataggtgcctcgggattccataccatagatccagtagatcctaattcacaatacgatttagattcaccgatcaactgatatccgctattacaagagtacgttatactagagccaaagtctactccaccaatatcaagttggccattatcgatatctcgaggcgatgggcatctccgtttaatacattgattaaagagtgtccatccagtacctgtacatttagcatatataggtcccattttttgctttctgtatccaggtagacatagatattctatagtgtctcctatgttgtaattagcattagcatcagtctccacactattcttaaatttcatattaatgggtcgtgacggaatagtacagcatgatagaacgcatcctattcccaacaatgtcaggaacgtcacgctctccaccttcatatttatttatccgtaaaaatgttatcctggacatcgtacaaataataaaaagcccatatatgttcgctattgtagaaattgtttttcacagttgctcaaaaacgatggcagtgacttatgagttacgttacactttggagtctcatctttagtaaacatatcataatattcgatattacgagttgacatatcgaacaaattccaagtatttgattttggataatattcgtattttgcatctgctataattaagatataatcaccgcaagaacacacgaacatctttcctacatggttaaagtacatgtacaattctatccatttgtcttccttaactatatatttgtatagataattacgagtctcgtgagtaattccagtaattacatagatgtcgccgtcgtactctacagcataaactatactatgatgtctaggcatgggagacttttttatccaacgatttttagtgaaacattccacatcgtttaatactacatatttctcatacgtggtataaactccacccattacatatatatcatcgtttacgaataccgacgcgcctgaatatctaggagtaattaagtttggaagtcttatccatttcgaagtgccgtgtttcaaatattctgccacacccgttgaaatagaaaattctaatcctcctattacatataactttccatcgttaacacaagtactaacttctgattttaacgacgacatattagtaaccgttttccattttttcgttttaagatctacccgcgatacggaataaacatgtctattgttaatcatgccgccaataatgtatagacaattatgtaaaacatttgcattatagaattgtctatctgtattaccgactatcgtccaatattctgttctaggagagtaatgggttattgtggatatataatcagagtttttaatgactactatattatgttttataccatttcgtgtcactggctttgtagatttggatatagttaatcccaacaatgatatagcattgcgcatagtattagtcataaacttgggatgtaaaatgttgatgatatctacatcgtttggatttttatgtatccactttaataatatcatagctgtaacatcctcatgatttacgttaacgtcttcgtgggataagatagttgtcagttcatcctttgataattttccaaattctggatcggatgtcaccgcagtaatattgttgattatttctgacatcgacgcattatatagttttttaattccatatcttttagaaaagttaaacatccttatacaatttgtgaaattaatattatgaatcatagtttttacacatagatctactacaggcggaacatcaattattatggcagcaactagtatcatttctacattgtttatggtgatgtttatcttcttccagcgcatatagtctaatagcgattcaaacgcgtgatagtttataccattcaatataatcgcttcatcctttagatggtgatcctgaatgcgtttaaaaaaattatacggagacgccgtaataatttccttattcacttgtataatttccccattgatagaaaatattacgctttccattcttaaagtactataagtaattatagtataatgtaaacgtttatatattcaatatttttataaaaatcattttgacattaattcctttttaaatttccgtctatcatctatagaaacgtattctatgaatttataaaatgcttttacgtgtcctatcgtaggcgatagaaccgctaaaaagcctatcgaatttctacaaaagaatctgttatatggtatagggagagtataaaacattaaatgtccgtacttattaaagtattcagtagccaatcctaactctttcgaatacttattaatggctcttgttctgtacgaatctatttttttgaacaacggacctagtggtatatcttgttctatgtatctaaaataatgtctgactagatccgttagtttaatatccgcagtcatcttgtctagaatggcaaatctaactgcgggtttaggctttagtttagtttctatatctacatctatgtctttatctaacaccaaaaatataatagctaatattttattacaatcatccggatattcttctacgatctcactaactaatgtttctttggttatactagtatagtcactatcggacaaataaagaaaatcagatgatcgatgaataatacatttaaattcatcatctgtaagatttttgagatgtctcattagaatattattagggttagtactcattatcattcggcagctattacttattttattatttttcaccatatagatcaatcattagatcatcaaaatatgtttcaatcatcctaaagagtatggtgaatgactcttcccatctaatttctgaacgttcaccaatgtctctagccactttggcactaatagcgatcattcgcttagcgtcttctatattattaactggttgatttaatctatctagcaatggaccgtcggacagcgtcattctcatgttcttaatcaatgtacatacatcgccgtcatctaccaattcatccaacaacataagctttttaaaatcatcattataataggtttgatcgttgtcatttctccaaagaatatatctaataagtagagtcctcatgcttagttaacaactattttttatgttaaatcaattagtacaccgctatgtttaatacttattcatattttagtttttaggattgagaatcaatacaaaaattaatgcatcattaattttagaaatacttagtttccacgtagtcaatgaaacatttgaactcatcgtacaggacgttctcgtacaggacgtaactataaaccggtttatatttgttcaagatagatacaaatccgataactttttttacgaattctacgggatccactttaaaagtgtcataccgggttctttttatttttttaaacagatcaatggtgtgatgttgattaggtcttttacgaatttgatatagaatagcgtttacatattctccataatggtcaatcgccatttgttcgtatgtcataaattctttaattatatgacactgtgtattatttagttcatccttgttcattgttaggaatctatccaaaatggcaattatactagaactataggtgcgttgtatacacatattgatgtgtctgtttatacaatccatgatatttggatccatgctactaccttcgggtaaaattgtagcatcatataccatttctagtactttaggttcattattatccattgcagaggacgtcatgatcgaatcataaaaaaatatattatttttatgttattttgttaaaaataatcatcgaatacttcgtaagatactccttcatgaacataatcagttacaaaacgtttatatgaagtaaagtatctacgatttttacaaaagtccggatgcataagtacaaagtacgcgataaacggaataataatagatttatctagtctatctttttctatagctttcatagttagatacatggtctcagaagtaggattatgtaacatcagcttcgataaaatgactgggttatttagtcttacacattcgctcatacatgtatgaccgttaactacagagtctacactaaaatgattgaacaatagatagtctaccattgtttcgtattcagatagtacagcgtagtacatggcatcttcacaaattatatcattgtctaatagatatttgacgcatcttatggatcccacttcaacagccatcttaaaatcatattgctttcctttatcattaataatttctagaacatcatctctatcataaaagatacaaatattaactgtttgatccgtaataacattgctagtcaatagcaatttgttaataagatgcgctgggctcaatgtcttaataagaagtgtaagaggactatctccgaatttgttttgtttattaacatccgttgatggaagtaaaagatctataatgtctacattcttgactgttttagagcatacaatatggagaggtgtatttccatcatgatctggttttgagggactaattcctagtttcatcatccatgagattgtagaagcttttggattgtctgacataagatgtctatgaatatgatttttgccaaatttatccactatcctggcttcgaatccgatggacattatttttttaaacactctttctgaaggatctgtacacgccaacaacggaccacatccttcttcatcaaccgagttgttaatcttggctccatactgtaccaataaatttattctctctatgacttcatcatctgttcccgagagataatatagaggtgttttatgctgtttatcacacgcgtttggatctgcgccgtgcgtcagcagcatcgcgactattctattattattaattttagaagctatatgcaatggataatttccatcatcatccgtctcatttggagagtatcctctatgaagaagttcttcgacaaatcgttcatctagtcctttaattccacaatacgcatgtagaatgtgataattatttccagaaggttcgatagcttgtagcatattcctaaatacatctaaatttttactattatatttggcataaagagatagataatactcggccgacataatgttgtccattgtagtataaaaattaatatttctatttctatttctgtatatttgcaacaatttactctctataacaaatatcataacttagtttttttatgtcaagaaggcactggtttagttcatctataaatgtcacgccataactaccacgcatgccatactcagaattatgataaagatatttatccttggggtgtaggtaatggggattaatctttgttggatcagtctctaagttaacacatgtcacacatgatccatttatagttatatcacacgatgatgatttatgaattgattccggaagatcgctatcgtattttgtggttccacaattcatttccatacatgttattgtcacactaatattatgatgaactttatctagccgctgagtggtaaacaacagaacagatagtttattatctttaccaacaccctcagccgctgccacaaatctctgatccgtatccatgatggtcatgtttatttctagtccgtatccagtcaacactatgttagcatttctgtcgatatagctttcactcatatgacactcaccaataatagtagaattaatgtcgtaatttacaccaatagtgagttcggcggcaaagtaccaataccggtaatcttgtcgaggaggacatatagtattcttgtattctaccgaatacccgagagatgcgatacaaaagagcaagactaatttgtaaaccatcttactcaaaatatgtaacaatagtacgatgcaatgagtaagacaataggaaatctatcttatatacacataattattctatcaattttaccaattagttagtgtaatgttaacaaaaatgtgggagaatctaattagtttttctttacacaattgacgtacatgagtctgagttccttgtttttgctaattatttcatccaatttattattcttgacgatatcgagatcttttgtataggagtcaaacttgtattcaacatgcttttctataatcattttagctatttcggcatcatccaatagtacattttccagattagcagaatagatattaatgtcgtatttgaacagagcctgtaacatctcaatgtctttattatctatagccaatttaatgtccggaatgaagagaagggaattattggtgtttgtcgacgtcatatagtcgagcaagagaatcatcatatccacgtgtccattttttatagtgatgtgaatacaactaaggagaatagccagatcaaaagtagatggtatctctgaaagaaagtaggaaacaatacttacatcattaagcatgacggcatgataaaatgaagttttccatccagttttcccatagaacatcagtctccaatttttcttaacaaacagttttaccgtttgcatgttaccactatcaaccgcataatacaatgcggtgtttcccttgtcatcaaattgtgaatcatccagtccactgaatagcaaaatctttactattttggtatcttccaatgtggctgcctgatgtaatggaaattcattctctagaagatttttcaatgctccagcgttcaacaacgtacatactagacgcacgttattatcagctattgcataatacaaggcactatgtccatggacatccgccttaaatgtatctttactagagagaaagcttttcagctgcttagacttccaagtattaattcgtgacagatccatgtctgaaacgagacgctaattagtgtatattttttcattttttataattttgtcatattgcaccagaattaataatatctttaatagatctgattagtagatacatggctatcgcaaaacaacatatacacatttaataaaaataatatttattaagaaaattcagatttcacgtacccatcaatataaataaaataatgattccttacaccgtacccatattaaggagattccaccttacccataaacaatataaatccagtaatatcatgtctgatgatgaacacaaatggtgtattaaattccagtttttcaggagatgatctcgccgtagctaccataatagtagatgcctctgctacagttccttgttcgtcgacatctatctttgcattctgaaacattttataaatatataatgggtccctagtcatatgtttaaacgacgcattatctggattaaacatactaggagccatcatttcggctatcgacttaatatccctcttattttcgatagaaaatttagggagtttaagattgtacactttattccctaattgagacgaccaatagtctaattttgcagccgtgatagaatctgtgaaatgggtcatattatcacctattgccaggtacatactaatattagcatccttatacggaaggcgtaccatgtcatattctttgtcatcgattgtgattgtatttccttgcaatttagtaactacgttcatcatgggaaccgttttcgtaccgtacttattagtaaaactagcattgcgtgttttagtgatatcaaacggatattgccatatacctttaaaatatatagtattaatgattgcccatagagtattattgtcgagcatattagaatctactacattagacataccggatctacgttctactatagaattaattttattaaccgcatctcgtctaaagtttaatctatataggccgaatctatgatattgttgataatacgacggtttaatgcacacagtattatctacgaaactttgataagttagatcagtgtacgtatatttagatgttttcagcttagctaatcctgatattaattctgtaaatgctggacccagatctctttttctcaaatccatagtcttcaataattctattctagtattacctgatgcaggcaatagcgacataaacatagaaaacgaataaccaaacggtgagaagacaatattatcatcttgaatatttttatacgctactataccggcattggtaaatccttgtagacgataggcggacgctgaacacgctaacgatagtatcaataacgcaatcatgattttatggtattaataattaaccttatttttatgttcggtataaaaaaattattgatgtctacacatccttttgtaattgacatctatatatccttttgtataatcaactctaatcactttaacttttacagttttccctaccagtttatccctatattcaacatatctatccatatgcatcttaacactctctgccaagatagcttcagagtgaggatagtcaaaaagataaatatatagagcataatcattctcgtatactctgccctttattacatcacccgcattgggcaacgaataacaaaatgcaagcatcttgttaacgggctcgtaaattgggataaaaattatgtttttattgtcttatatctattttattcaagagaatattcaggaatttctttttccggttgtatctcgtcgcagtatatatcatttgtacattgtttcatattttttaatagtttacaccttttagtaggactagtatcgtacaattcatagctgtattttgaattccaatcacgcataaaaatatcttccaattgttgacgaagacctaatccatcatccggtgtaatattaatagatgctccacatgtatccgtaaagtaatttcctgtccaatttgaggtacctatataggccgttttatcggttaccatatatttggcatggtttaccctagaatacggaatgggaggatcagcatctggtacaataaatagctttacttctatatttatgtttttagattttagcatagcgatagatcttaaaaagtttctcatgataaacgaagatcgttgccagcaactaatcaatagcttaacggatacttgtctgtctatagcggatcttcttaattcatcttctatataaggccaaaacaaaattttacccgccttcgaataaataatagggataaagttcataacagatacataaacgaatttactcgcatttctaatacatgacaataaagcggttaaatcattggttctttccatagtacatagttgttgcggtgcagaagcaataaatacagagtgtggaacgccgcttacgttaatactaagaggatgatctgtattataatacgacggataaaagtttttccaattatatggtagattgttaactccaagataccagtatacctcaaaaatttgagtgagatccgctgccaagttcctattattgaagatcgcaatacccaattccttgacctgagttagtgatctccaatccatgttagcgcttcctaaataaatatgtgtattatcagatatccaaaattttgtatgaagaactcctcctaggatatttgtaatatctatgtatcgtacttcaactccggccatttgtagtctttcaacatcctttaatggtttgttagatttattaacggctactctaactcgtactcctcttttgggtaattgtacaatctcgtttaatattatcgtgccgaaattcgtacccacttcatccgataaactccaataaaaagatgatatatctagtgtttttgtggtattggatagaatttccctccacatgttaaatgtagacaaatatactttatcaaattgcatacctataggaatagtttctgtaatcactgcgattgtattatccggattcattttatttgttaaaagaataatcctatatcacttcactctattaaaaatccaagtttctatttctttcatgactgattttttaacttcatccgtttccttatgaagatgatgtttggcaccttcataaatttttatttctctattacaatttgcatgttgcatgaaataatatgcacctaaaacatcgctaatcttattgtttgttccctggagtatgagagtcggggggtgttaatcttggaaattatttttctaaccttgttggtagccttcaagacctgactagcaaatccagccttaattttttcatgattgactaatgggtcgtattggtatttataaactttatccatatctctagatactgattctggacatagctttccgactggcgcatttggtgtgatggttcccataagtttggcagctagcagattcagtcttgaaacagcatctgcattaactagaggagacattagaatcattgctgtaaacaagtttggattatcgtaagaggctagctcccatggaatgacccaataagtagatttaatagttaccacgtgctgtaccaaagtcatcaatcatcattttttcaccattacttcttccatgtccaatatgatcatgtgagaatactaaaattcctaacgatgatatgttttcagctagttcgtcataacgtccagaatgtttaccagctccatgacttatgaatactaatgccttaggatatgtaataggtttccaatatttacaatatatgtaatcattgtccagattgaacatacagtttgcactcatgattcacgttatataactatcaatattaacagttcgtttgatgatcatattatttttatgttttattgataattgtaaaaacatacaattaaatcaatatagaggaaggagacggctactgtcttttgtaagatagtcatggcgactaaattagattatgaggatgctgttttttactttgtggatgatgataaaatatgtagtcgcgactccatcatcgatctaatagatgaatatattacgtggagaaatcatgttatagtgtttaacaaagatattaccagttgtggaagactgtacaaggaattgatgaagttcgatgatgtcgctatacggtactatggtattgataaaattaatgagattgtcgaagctatgagcgaaggagaccactacatcaattttacaaaagtccatgatcaggaaagtttattcgctaccataggaatatgtgctaaaatcactgaacattggggatacaaaaagatttcagaatctagattccaatcattgggaaacattacagatttgatgaccgacgataatataaacatcttgatactttttctagaaaaaaaattgaattgatgatataggggtcttcataacgcataattattacgttagcattctatatccgtgttaaaaaaaattatcctatcatgtatttgagagttttatatgtagcaaacatgatagctgtgatgccaataagctttagatattcacgcgtgctagtgttagggatggtattatctggtggtgaaatgtccgttatataatctacaaaacaatcatcgcatatagtatgcgatagtagagtaaacatttttatagtttttactggattcatacatcgtctacccaattcggttataaatgaaattgtcgccaatcttacacccaaccccttgttatccattagcatagtattaacttcgttatttatgtcataaactgtaaatgattttgtagatgccatatcatacatgatattcatgtccctattataatcattactaactttatcacaatatatgttgataatatctatatatgatctagtctttgtgggcaactgtctatacaagtcgtctaaacgttgtttactcatatagtatcgaacagccatcattacatggtcccgttccgttgatagataatcgagtatgttagtggacttgtcaaatctatataccatattttctggaagtggatatacatagtcgtgatcaacattattgctagcctcatcttctatatcctgtactataccattatctatatcatctacataatctatgatattattacacataaacatcgacaacatactattgtttattatctaagtcctgttgatccaaacccttgatctcctctatttgtactatctagagattgtacttcttccagttctggataatatatacgttgatagattagctgagctattctatctccagtatttacattaaacgtacattttccattattaataagaatgactcctatgtttcccctataatcttcgtctattacaccacctcctatatcaatgccttttagtgacagaccagacctaggagctattctaccatagcagaacttaggcatggacatactaatatctgtcttaattaactgtctttctcctggagggatagtataatcgtaagcgctatacaaatcatatccggcagcacccggcgattgcctagtaggagatttagctctgttagtttccttaacaaatctaactggtgagttaatattcatgttgaacataaaactaatattttatttcaaaattatttaccatcccatatattccatgaataagtgtgatgattgtacacttctatagtatctatatacgatccacgataaaatcctcctatcaatagcagtttattatccactatgatcaattctggattatccctcggataaataggatcatctatcagagtccatgtattgctggattcacaataaaattccgcatttctaccaaccaagaataaccttctaccgaacactaacgcgcatgatttataatgaggataataagtggatggtccaaactgccactgatcatgattgggtagcaaatattctgtagttgtatcagtttcagaatgtcctcccattacgtatataacattgtttatggatgccactgctggattacatctaggtttcagaagactcggcatattaacccaagcagcatccccgtggaaccaacgctcaacagatgtgggatttggtagacctcctactacgtataatttattgttagcgggtatcccgctagcatacagtctggggctattcatcggaggaattggaatccaattgtttgatatataatttacagctatagcattgttatgtatttcattgttcatccatccaccgatgagatatactacttctccaacatgagtacttgtacacatatggaatatatctataatttgatccatgttcataggatactctatgaatggatacttgtatgatttgcgtggttgtttatcacaatgaaatattttggtacagtctagtatccattttacattatttatacctctgggagaaagataatttgacctgattacatttttgataaggagtagcagatttcctaatttatttcttcgcctcatataccacttaatgacaaaatcaactacataatcctcatctggaacatttagttcatcgctttctagaataagtttcatagatagataatcaaaattgtctatgatgtcatcttccagttccaaaaagtgtttggcaataaagtttttagtatgacataagagattggatagtccgtattctatacccatcatgtaacactcgacacaatattcctttctaaaatctcgtaagataaagtttatacaagtgtagatgataaattctacagaggttaatatagaagcacgtaataaattgacgacgttatgactatctatatatacctttccagtatatgagtaaataactatagaagttaaactgtgaatgtcaaggtctagacaaacccttgtaactggatctttatttttcgtgtatttttgacgtaaatgtgtgcgaaagtaaggagataactttttcaatatcgtagaattgactattatattgcctcctatggcatcaataattgttttgaatttcttagtcatagacaatgctaatatattcttacagtacacagtattgacaaatatcggcatttatgtttctttaaaagtcaacatctagagaaaaatgattatctttttgagacataactcccattttttggtattcacccacacgtttttcgaaaaaattagtttttccttccaatgatatattttccatgaaatcaaacggattggtaacattataaatttttttaaatcccaattcagaaatcaatctatccgcgacgaattctatatatgttttcatcatttcacaattcattcctataagtttaactggaagagccgcagtaagaaattcttgttcaatggatactgcatctgttataatagatctaacggtttcttcactcggtggatgcaataaatgtttaaacatcaaacatgcgaaatcgcagtgcagaccctcgtctctactaattagttcgttggaaaacgtgagtccgggcattaggccacgctttttaagccaaaatatggaagcgaatgatccagaaaagaaaattccttctactgcagcaaaggcaataagtctctctccataaccggcgctgtcatgtatccacttttgagcccaatcggccttcttttttacacaaggcatcgtttctatggcattaaagagatagtttttttcattactatctttaacataagtatcgatcaaaagactatacatttccgaatgaatgttttcaatggccatctgaaatccgtagaaacatctagcctcggtaatctgtacttctgtacaaaatcgttccgccaaattttcattcactattccgtcactggctgcaaaaaacgccaatacatgttttataaaatatttttcgtctggtgttagtttattccaatcattgatatctttagatatatctacttcttccactgtccaaaatgatgcctctgcctttttatacatgttccagatgtcatgatattggattgggaaaataacaaatctatttggatttggtgcaaggatgggttccataactaaattaacaataacaataaattttttttcagttatctatatgcctgtacttggattttttgtacatcgatatcgccgcaatcactacaataattacaagtattattgatagcattgttattagtactatcataattaaattatctacattcatgggtgctgaataatcgttattatcatcattatcattttgtaattgtgacatcatactagataaatcgtttgcgagattgttgtgggaagcgggcatggaggatgcattatcattattatttaacgccttccatttggattcacaaatgttacgcacattcaacattttatggaaactataattttgtgaaaacaaataacaagaaaactcgtcatcgttcaaatttttaacgatagtaaaccgattaaacgtcgagctaatttctaacgctagcgactctgttggatatgggtttccagatatatatcttttcagttcccctacgtatctataatcatctgtaggaaatggaagatatttccatttatctactgttcctaatatcatatgtggtggtgtagtagaaccattaagcgcgaaagatgttatttcgcatcgtattttaacttcgcaataatttctggttagataacgcactctaccagtcaagtcaatgatattagcctttacagatatattcatagtagtcgtaacgatgactccatcttttagatgcgatactcctttgtatgtaccagaatcttcgtacctcaaactcgatatatttaaacaagttaatgagatattaacgcgttttatgaatgatgatatataaccagaagttttatcctcggtggctagcgctataaccttatcattataataccaactagtgtgattaatatgtgacacgtcagtgtgggtacaaatatgtacattatcgtctacgtcgtattcgatacatccgcatacagccaacaaatataaaatgacaaatactctaacgccgttcgtacccatcttgatgcggtttaataaatgttttgatttcaatttattgtaaaaaaagattcggttttatactgttcgatattctcattgcttatattttcatctatcatctccacacagtcaaatccgtggttagcatgcacctcatcaaccggtaaaagactatcggactcttctatcattataactctagaatatttaatttggtcattattaatcaagtcaattatcttatttttaacaaacgtgagtattttactcattttttataaaaacttttagaaatatacagactctatcgtgtgtctatatcttctttttatatccaatgtatttatgtctgatttttcttcatttatcatatataatggtccaaattctacacgtgcttcggattcatccagatcattaaggttcttataattgtaacatccttctcttccctcttctacatcttccttcttattcttattcttagcgtcacagaatctaccacagcaggatcccatgacgagcgtcatattaaactaatccattttcaattataatatatgattagtaatgaccattaaaataaaaaatattcttcataaccggcaagaaagtgaaaagttcacattgaaactatgtcagtagtatacatcatgaaatgatgatatatatatactctattttggtggaggattatatgatataattcgtggataatcatttttaagacacatttctttattcgtaaatcttttcacgttaaatgagtgtccatattttgcaatttcttcatatgatggcggtgtacgtggacgaggctgctcctgttcttgttgtggtcgccgactgtcgtgtctgcgtttagatccctccattatcgcgattgcgtagatggagtactattttataccttgtaattaaatttttttattaattaaacgtataaaaacgttccgtatctgtatttaagagccagatttcgtctaatagaacaaatagctacagtaaaaataactagaataattgctacacccactagaaaccacggatcgtaatacggcaatcggttttcgataataggtggaacgtatattttatttaaggacttaacaattgtctgtaaaccacaatttgcttccgcggatcctgtattaactatctgtaaaagcatatgttgaccgggcggagccgaacattctccgatatctaatttctgtatatctataatattattaacctccgcatacgcattacagttcttttctagcttggataccgcactaggtacatcgtctagatctattcctatttcctcagcgatagctcttctatccttttccggaagcaatgaaatcacttcaataaatgattcaaccatgagtgtgaaactaagtcgagaattactcatgcatttgttagttattcggagcgcgcaatttttaaactgtcctataacctctcctatatgaatagcacaagtgacattagtagggatagaatgttgagctaatttttgtaaataactatctataaaaagattatacaaagttttaaactctttagtttccgccatttatccagtctgagaaaatgtctctcataataaatttttccaagaaactaattgggtgaagaatggaaacctttaatctatatttatcacagtctgttttggtacacatgatgaattcttccaatgccgtactaaattcgatatctttttcgatttctggatatgtttttaataaagtatgaacaaagaaatggaaatcgtaataccagttatgtttaactttgaaattgttttttattttcttgttaatgattccagccacttgggaaaagtcaaagtcgtttaatgccgatttaatacgttcattaaaaacaaactttttatcctttagatgaattattattggttcattggaatcaaaaagtaagatattatcgggtttaagatctgcgtgtaaaaagttgtcgcaacagggtagttcgtagattttaatgtataacagagccatctgtaaaaagataaactttatgtattgtaccaaagatttaaatcctaatttgatagctaactcggtatctactttatctgccgaatacagtgctaggggaaaaattataatgtttcctctttcatattcgtagttagttctcttttcatgttcgaaaaagtgaaacatgcggttaaaatagtttataacattaatattactgttaataactgccggataaaagtgggatagtaatttcacgaatttgatactgtcctttctctcgttaaacgcctttaaaaaaactttagaagaatatctcaatgagagttcctgaccatccatagtttgtatcaataatagcaacatatgaagaacacgtttatacagagtatgtaaaaatgttaatttatagtttaatcccatggcccacgcacacacgattaattttttttcatctccctttagattgttgtatagaaatttgggtactgtgaactccgccgtagtttccatgggactatataattttgtggcctcgaatacaaattttactacatagttatctatcttaaagactataccatatcctcctgtagatatgtgataaaaatcgtcgtttataggataaaatcgtttatccttttgttggaaaaaggatgaattaatgtaatcattctcttctatctttagtagtgtttccttattaaaattcttaaaataatttaacaatctaactgacggagcccaattttggtgtaaatctaattgggacattatattgttaaaatacaaacagtctcctaatataacagtatctgataatctatggggagacatccattgatattcaggggatgaatcattggcaacacccatttattgtacaaaaagccccaatttacaaacgaaagtccaggtttgatagagacaaacaattaactattttgtctctgtttttaacacctccacagtttttaatttctttagtaatgaaattattcacaatatcagtatcttctttatctaccagagattttactaacttgataaccttggctgtctcattcaatagggtagtaatatttgtatgtgtgatattgatatctttttgaattgtttcttttagaagtgattctttgatggtgccagcatacgaattacaataatgcagaaactcggttaacatgcaggaattatagtaagccaattccaattgttgcctgtgttgtattagagtgtcaatatgagcaatggtgtccttgcgtttctctgatagaatgcgagcagcgattttggcgttatcatttgacgatatttctggaatgacgaatcctgtttctactaactttttggtaggacaaagtgaaacaatcaagaagatagcttctcctcctatttgtggaagaaattgaactcctctagatgatctactgacgatagtatctccttgacagatattggaccgaattacagaagtacctggaatgtaaagccctgaaaccccctcattttttaagcagattgttgccgtaaatcctgcactatgcccaagatagagagctcctttggtgaatccatctctatgtttcagtttaaccaagaaacagtcagctggtctaaaatttccatctctatctaatacagcatctaacttgatgtcaggaactatgaccggtttaatgttatatgtaacattgagtaaatccttaagttcataatcatcactgtcatcagttatgtacgatccaaacaatgtttctaccggcatagtggatacgaagatgctatccatcagaatgtttccctgattagtattttctatatagctattcttctttaaacgattttccaaatcagtaactatgttcatttttttaggagtaggacgcctagccagtatggaagaggattttctagatcctctcttcaacatctttgatctcgatggaatgcaaaaccccatagtgaaacaaccaacgataaaaataatattgtttttcactttttataattttaccatctgactcatggattcattaatatctttataagagctactaacgtataattctttataactgaactgagatatatacaccggatctatggtttccataattgagtaaatgaatgctcggcaataactaatggcaaatgtatagaacaacgaaattatactagagttgttaaagttaatattttctatgagctgttccaataaattatttgttgtgactgcgttcaagtcataaatcatcttgatactatccagtaaaccgtttttaagttctggaatattatcatcccattgtaaagcccctaattcgactatcgaatatcctgctctgatagcagtttcaatatcgacggacgtcaatactgtaataaaggtggtagtattgtcatcatcgtgataaactacgggaatatggtcgttagtaggtacggtaactttacacaacgcgatatataactttccttttgtaccatttttaacgtagttgggacgtcctgcagggtattgttttgaagaaatgatatcgagaacagatttgatacgatatttgttggattcctgattattcactataatataatctagacagatagatgattcgataaatagagaaggtatatcgttggtaggataatacatccccattccagtattctcggatactctattgatgacactagttaagaacatgtcttctattctagaaaacgaaaacatcctacatggactcattaaaacttctaacgctcctgattgtgtctcgaatgcctcgtacaaggatttcaaggatgccatagattctttgaccaacgatttagaattgcgtttagcatctgatttttttattaaatcgaatggtcggctctctggtttgctaccccaatgataacaatagtcttgtaaagataaaccgcaagaaaatttatacgcatccatccaaataaccctagcaccatcggatgatattaatgtattattatagattttccatccacaattattgggccagtatactgttagcaacggtatatcgaatagattactcatgtaacctactagaatgatagttcgtgtactagtcataatatctttaatccaatctaaaaaatttaaaattagattttttacactgttaaagttaacaaaagtattacccgggtacgtggatatcatatatggcattggtccattatcagtaatagctccataaactgatacggcgatggtttttatatgtgtttgatctaacgaggaagaaattcgcgcccacaattcatctctagatatgtatttaatatcaaacggtaacacatcaatttcgggacgcgtatatgtttctaaatttttaatccaaatataatgatgacctatatgccctattatcatactgtcaactatagtacacctagggaacttacgatacatctgtttcctataatcgttaaattttacaaatctataacatgctaaaccttttgacgacagccattcattaatttctgatatggaatctgtattctcgataccgtatcgttctaaagccagtgctatatctccctgttcgtgggaacgctttcgtataatatcgatcaacggataatctgaagtttttggagaataatatgactcatgatctatttcgtccataaacaatctagacataggaattggaggcgatgatcttaattttgtgcaatgagtcgtcaatcctataacttctaatcttgtaatattcatcatcgacataatactatctatgttatcatcgtatattagtataccatgaccttcttcatttcgtgccaaaatgatatacagtcttaaatagttacgcaatatctcaatagtttcataattgttagctgttttcatcaaggtttgtatcctgtttaacatgatggcgttctataacgtctctattttctatttttaattttttaaatttttaacgatttactgtggctagatacccaatctctctcaaatatttttttagcctcgcttacaagctgtttatctatactattaaaactgacgaatccgtgattttggtaatgggttccgtcgaaatttgccgaagtgatatgaacatattcgtcgtcgactatcaacaattttgtattattctgaatagtgaaaaccttcacagatagatcattttgaacacacaacgcatctagacttttggcggttgccatagaatatacgtcgttcttatcccaattaccaactagaagtctgatcttaactcctctattaatggctgcttctataatggagttgtaaatgtcgggccaatagtagctattaccgtcgacacgtgtagtgggaactatggccaaatgttcaatatctatactagtcttagctgacctgagtttatcaataactacatcggtatctagatctctagaatatcccaataggtgttccggagaatcagtaaagaacactccacctataggattcttaatatgatacgcagtgctaactggcaaacaacaagccgcagagcataaattcaaccatgaattttttgcgctattaaaggctttaaaagtatcaaatcttctacgaagatctgtggccagcgggggataatcagaatatacacctaacgttttaatcgtatgtatagatcctccagtaaatgacgcgtttcctacataacatctttcatcatctgacacccaaaaacaaccgagtagtagtcccacattattttttttatctatattaacggttataaaatttatatccgggcagtgactttgtagctctcccagatttcttttccctcgttcatctagcaaaactattattttaatccctttttcagatgcctcttttagtttatcaaaaataagcgctcccctagtcgtactcagaggattacaacaaaaagatgctatgtatatatatttcttagctagagtgataatttcgttaaaacattcaaatgttgttaaatgatcggatctaaaatccatattttctggtagtgtttctaccagcctacattttgctcccgcaggtaccgatgcaaatggccacatttagttaacataaaaacttatacatcctgttctatcaacgattctagaatatcatcggctatatcgctaaaattttcatcaaagtcgacatcacaacctaactcagtcaatatattaagaagttccatgatgtcatcttcgtctatttctatatccgtatccattgtagattgttgaccgattatcgagtttaaatcattactaatactcaatccttcagaatacaatctgtgtttcattgtaaatttataggcggtgtatttaagttggtagattttcaattatgtattaatatagcaacagtagttcttgctcctccttgattctagcatcctcttcattattttcttctacgtacataaacatgtccaatacgttagacaacacaccgacgatggcggccgcagatctcgagttatgatctacttccttaccgtgcaataaattagaatatattttctacttttacgagaaattaattattgtatttattatttatgggtgaaaaacttactataaaaagcgggtgggtttggaattagtgaaagcttaaaaattgaaattttattttttttttttggaatataaataagctcgaagtcgacagatctaggcctggtaccaggaggaggaattcagcttaaagatgacttcgaaagtttatgatccagaacaaaggaaacggatgataactggtccgcagtggtgggccagatgtaaacaaatgaatgttcttgattcatttattaattattatgattcagaaaaacatgcagaaaatgctgttatttttttacatggtaacgcggcctcttcttatttatggcgacatgttgtgccacatattgagccagtagcgcggtgtattataccagatcttattggtatgggcaaatcaggcaaatctggtaatggttcttataggttacttgatcattacaaatatcttactgcatggtttgaacttcttaatttaccaaagaagatcatttttgtcggccatgattggggtgcttgtttggcatttcattatagctatgagcatcaagataagatcaaagcaatagttcacgctgaaagtgtagtagatgtgattgaatcatgggatgaatggcctgatattgaagaagatattgcgttgatcaaatctgaagaaggagaaaaaatggttttggagaataacttcttcgtggaaaccatgttgccatcaaaaatcatgagaaagttagaaccagaagaatttgcagcatatcttgaaccattcaaagagaaaggtgaagttcgtcgtccaacattatcatggcctcgtgaaatcccgttagtaaaaggtggtaaacctgacgttgtacaaattgttaggaattataatgcttatctacgtgcaagtgatgatttaccaaaaatgtttattgaatcggatccaggattcttttccaatgctattgttgaaggcgccaagaagtttcctaatactgaatttgtcaaagtaaaaggtcttcatttttcgcaagaagatgcacctgatgaaatgggaaaatatatcaaatcgttcgttgagcgagttctcaaaaatgaacaagcggccgccgccaccatgagcaagggcgaggaactgttcactggcgtggtcccaattctcgtggaactggatggcgatgtgaatgggcacaaattttctgtcagcggagagggtgaaggtgatgccacatacggaaagctcaccctgaaattcatctgcaccactggaaagctccctgtgccatggccaacactggtcactaccttcacctatggcgtgcagtgcttttccagatacccagaccatatgaagcagcatgactttttcaagagcgccatgcccgagggctatgtgcaggagagaaccatctttttcaaagatgacgggaactacaagacccgcgctgaagtcaagttcgaaggtgacaccctggtgaatagaatcgagctgaagggcattgactttaaggaggatggaaacattctcggccacaagctggaatacaactataactcccacaatgtgtacatcatggccgacaagcaaaagaatggcatcaaggtcaacttcaagatcagacacaacattgaggatggatccgtgcagctggccgaccattatcaacagaacactccaatcggcgacggccctgtgctcctcccagacaaccattacctgtccacccagtctgccctgtctaaagatcccaacgaaaagagagaccacatggtcctgctggagtttgtgaccgctgctgggatcacacatggcatggacgagctgtacaagtgagcggccgccctgctagcaagcttgctagcggccgctcgagatctgcggccgctacagacacgaatatgactaaaccgatgaccatttaaaaacccctctctagctttcacttaaactgtatcgatcattcttttagcacatgtataatataaaaacattattctatttcgaatttaggcttccaaaaatttttcatccgtaaaccgataataatatatatagacttgttaatagtcggaataaatagattaatgcttaaactatcatcatctccacgattagagatacaatatttacattctttttgctgtttcgaaactttatcaatacacgttaatacaaacccaggaaggagatattgaaactgaggctgttgaaaatgaaacggtgaatacaataattcagataatgtaaaatcatgattccgtattctgatgatattagaactgctaatggatgtcgatggtatgtatctaggagtatctattttaacaaagcatcgatttgctaatatacaattatccttttgattaattgttattttattcatattcttaaaaggtttcatatttatcaattcttctacattaaaaatttccatttttaatttatgtagccccgcaatactcctcattacgtttcattttttgtctataatatccattttgttcatctcggtacatagattatccaattgagaagcgcatttagtagttttgtacattttaagtttattgacgaatcgtcgaaaactagttatagttaacattttattatttgataccctgatattaatacccctgccgttactattatttataactgatgtaatccacgtaacattggaattaactatcgatagtaatgcatcgacgcttccaaaattgtctattataaactcaccgataatttttttattgcatgttttcatattcattaggattatcaaatctttaatcttattacgattgtatgcgttgatattacaagacgtcattctaaaagacggaggatctccatcaaatgccagacaatcacgtacaaagtacatggaaataggttttgttctattgcgcatcatagatttatatagaacacccgtagaaatactaatttgttttactctataaaatactaatgcatctatttcatcgttttgtataacgtctttccaagtgtcaaattccaaatttttttcattgatagtaccaaattcttctatctctttaactacttgcatagataggtaattacagtgatgcctacatgccgttttttgaaactgaatagatgcgtctagaagcgatgctacgctagtcacaatcaccactttcatatttagaatatatatatgtaaaaatatagtagaatttcattttgtttttttctatgctataaatgaattctcattttgcatctgctcatactccgttttatattaataccaaagaaggaagatatctggttctaaaagccgttaaagtatgcgatgttagaactgtagaatgcgaaggaagtaaagcttcctgcgtactcaaagtagataaaccctcatcgcccgcgtgtgagagaagaccttcgtccccgtccagatgcgagagaatgaataaccctggaaaacaagttccgtttatgaggacggacatgctacaaaatatgttcgcggctaatcgcgataatgtagcttctagacttttgtcctaaaatactattatatccttttcgatattaataaatccgtgtcgtccaggttttttatctctttcagtatgtgaatagataggtattttatctctattcatcatcgaatttaagagatccgataaacattgtttgtattctccagatgtcagcatctgatacaacaatatatgtgcacataaacctctggcacttatttcatgtaccttccccttatcactaaggagaatagtatttgagaaatatgtatacatgatattatcatgaattagatatacagaatttgtaacactctcgaaatcacacgatgtgtcggcgttaagatctaatatatcactcgataacacattttcatctagatacactagacattttttaaagctaaaatagtctttagtagtaacagtaactatgcgattattttcatcgatgatacatttcatcggcatattattacgcttaccatcaaagactataccatgtgtatatctaacgtattctagcatggttgccatacgcgcattaaacttttcaggatctttggatagatcttccaatctatctatttgagaaaacatttttatcatgttcaatagttgaaacgtcggatccactatatagatattatctataaagattttaggaactacgttcatggtatcctggcgaatattaaaactatcaatgatatgattatcgttttcatcttttatcaccatatagtttctaagatatgggattttacttaatataatattatttcccgtgataaattttattagaaaggccaaatctataagaaaagtcctagaattagtctgaagaatatctatatcgccgtatagtatatttggattaattagatatagagaatatgatccgtaacatatacaacttttattatggcgtctaagatattcttccatcaacttattaacatttttgactagggaagatacattatgacgtcccattacttttgccttgtctattactgcgacgttcatagaatttagcatatctcttgccaattcttccattgatgttacattataagaaattttagatgaaattacatttggagctttaatagtaagaactcctaatatgtccgtgtatgtggtcactaatacagattgtagttctataatcgtaaataatttacctatattatatgtttgagtctgtttagaaaagtagctaagtatacgatcttttatttctgatgcagatgtattaacatcggaaaaaaatctttttttattcttttttactaaagatacaaatatgtctttgttaaaaacagttattttctgaatatttctagcttgtaattttaacatatgatattcgttcacactaggtactctgcctaaataggtttctataatctttaatgtaatattaggaaaagtattctgatcaggattcctattcattttgaggatttaaaactctgattattgtctaatatggtctctacgcaaactttttcacagagcgatagagtttttgataactcgtttttcttaagaaatataaaactactgtctccagagctcgctctatcttttattttatctaattcgatacaaactcctgatactggttcagaaagtaattcattaattttcagtcctttatagaagatatttaatatagataatacaaaatcttcagtttttgatatcgatctgattgatcctagaactagatatattaataacgtgctcattaggcagtttatggcagcttgataattagatatagtatattccagttcatatttattagataccgcattgcccagattttgatattctatgaattcctctgaaaataaatccaaaataactagacattctattttttgtggattagtgtactctcttccctctatcatgttcactactggtgtccacgatgataaatatctagagggaatataatatagtccataggatgccaatctagcaatgtcgaataactgtaattttattcttcgctcttcattatgaattgattcttgaggtataaacctaacacaaattatattattagacttttcgtatgtaatgtctttcatgttataagtttttaatcctggaatagaatctattttaatgaggcttttaaacgcagagttctccaacgagtcaaagcataatactctgttgtttttcttatatacgatgttacgattttcttctttgaatggaataggtttttgaattagtttataattacaacataatagataaggaagtgtgcaaatagtacgcggaaaaaacataatagctcccctgttttcatccatggttttaagtaaatgatcactggcttctttagtcaatggatattcgaacattaaccgtttcatcatcattggacagaatccatatttcttaatgtaaagagtgatcaaatcattgtgtttattgtaccatcttgttgtaaatgtgtattcggttatcggatctgctcctttttctattaaagtatcgatgtcaatctcgtctaagaattcaactatatcgacatatttcatttgtatacacataaccattactaacgtagaatgtataggaagagatgtaacgggaacagggtttgttgattcgcaaactattctaatacataattcttctgttaatacgtcttgcacgtaatctattatagatgccaagatatctatataattattttgtaagatgatgttaactatgtgatctatataagtagtgtaataattcatgtattttgatatatgttccaactctgtctttgtgatgtctagtttcgtaatatctatagcatcctcaaaaaatatattcgcatatattcccaagtcttcagttctatcttctaaaaaatcttcaacgtatggaatataataatctattttacctcttctgatatcattaatgatatagtttttgacactatcttctgtcaattgattcttattcactatatctaagaaacggatagcgtccctaggacgaactactgccattaatatctctattatagcttctggacataattcatctattataccagaattaatgggaactattccgtatctatctaacatagttttaagaaagtcagaatctaagacttgatgttcatatattggttcatacatgaaatgatctctattgatgatagtgactatttcattctctgaaaattggtaactcattctatatatgctttccttgttgatgaaggatagaatatactcaatagaatttgtaccaacaaactgttctcttatgaatcgtatatcatcatctgaaataatcatgtaaggcatacatttaacaattagagacttgtctcctgttatcaatatactattcttgtgataatttatgtgtgaggcaaatttgtccacgttctttaattttgttatagtagatatcaaatccaatggagctacagttcttggcttaaacagatatagtttttctggaacaaattctacaacattattataaaggactttgggtagataagtgggatgaaatcctattttaattaatgcgatagccttgtcctcgtgcagatatccaaacgcttttgtgatagtatggcattcattgtctagaaacgctctacgaatatctgtgacagatatcatctttagagaatatactagtcgcgttaatagtactacaatttgtattttttaatctatctcaataaaaaaattaatatgtatgattcaatgtataactaaactactaactgttattgataactagaatcagaatctaatgatgacgtaaccaagaagtttatctactgccaatttagctgcattatttttagcatctcgtttagattttccatcggccttatcgaatactcttccgtcgatgtctacacaggcataaaatgtaggagagttactaggcccaactgattcaatacgaaaagaccaatctctcctagtaatttggcagtactcattaataacggtgacagggttagcatctttccaatcaataatttttttagccggaataacatcatcaaaagacttatgatcctctctcattgatttttcgcgggatacatcatctattatgacgtcagccatagcatcagcatccggcttatccgcctccgttgtcataaaccaacgaggaggaatatcgtcggagctgtacaccatagcactacgttgaagatcgtacagagctttattaacttctcgcttctccatattaagttgtctagttagttgtgcagcagtagctccttcgattccaatgtttttaatagccgcacacacaatctctgcgtcagaacgctcgtcaatatagatcttagacatttttagagagaactaacgcaaccagcaataaaactgaacctactttatcatttttttattcatcatcctctggtggttcgtcgttcctatcaaatgtagctctgattaacccgtcatctataggtgatgctggttctggagattctggaggagatggattattatctggaagaatctctgttatttccttgttttcatgtatcgattgcgttgtaacattaagattgcgaaatgctctaaatttgggaggcttaaagtgttgtttgcaatctctacacgcgtgtctaactagtggaggttcgtcagctgctctagtttgaatcatcatcggcgtagtattcctacttttacagttaggacacggtgtattgtatttctcgtcgagaacgttaaaataatcgttgtaactcacatcctttattttatctatattgtattctactcctttcttaatgcattttataccgaataagagatagcgaaggaattctttttcggtgccgctagtacccttaatcatatcacatagtgttttatattccaaatttgtggcaatagacggtttatttctatacgatagtttgtttctggaatcctttgagtattctataccaatattattctttgattcgaatttagtttcttcgatattagattttgtattacctatattcttgatgtagtactttgatgatttttccatggcccattctattaagtcttccaagttggcatcatccacatattgtgatagtaattctcggatatcagtagcggctaccgccattgatgtttgttcattggatgagtaactactaatgtatacattttccatttataacacttatgtattaactttgttcatttatattttttcattattatgttgatattaacaaaagtgaatatatatatgttaataattgtattgtggttatacggctacaattttataatgagtgaaagtcagtgtccgatgatcaatgacgatagctttactctgaaaagaaagtatcaaatcgatagtgcggagtcaacaataaaaatggataagaagaggataaagtttcagaatagagccaaaatggtaaaagaaataaatcagacaataagagcagcacaaactcattacgagacattgaaactaggatacataaaatttaagagaatgattatgactactactctagaagatatagcaccatctattccaaataatcagaaaacttataaactattctcggacatttcagccatcggcaaagcatcacagaatccgagtaagatggtatatgctctgctgctttacatgtttcccaatttgtttggagatgatcatagattcattcgttatagaatgcatccaatgagtaaaatcaaacacaagatcttctctcctttcaaacttaatcttattagaatattagtggaagaaagattctataataatgaatgcagatctaataaatggagaataattggaacacaagttgataaaatgttgatagctgaatctgataaatatacaatagatgcaaggtataacctaaaacccatgtatagaatcaagggagaatctgaagaagataccctctttatcaaacagatggtagaacaatgtgtgacatcccaggaattggtggaaaaagtgttgaagatactgtttagagatttgttcaagagtggagaatacaaagcgtacagatacgatgatgatgtagaaaatggatttattggattggatacactaaaattaaacattgttcatgatatagttgaaccatgtatgcctgttcgtaggccagtggctaagatactgtgtaaagaaatggtaaataaatactttgagaatccgctacatattattggtaaaaatcttcaagagtgcattgactttgttagtgaataggcatttcatctttctccaatactaattcaaattgttaaattaataatggatagtataaatagttattagttataagatagtaaaaataattattagaataagagtgtagtatcatagataactctcttctataaaaatggattttattcgtagaaagtatcttatatacacagtagaaaataatatagattttttaaaggatgatacattaagtaaagtaaacaattttaccctcaatcatgtactagctctcaagtatctagttagcaattttcctcaacacgttattactaaggatgtattagctaataccaatttttttgttttcatacatatggtacgatgttgtaaagtgtacgaagcggttttacgacacgcatttgatgcacccacgttgtacgttaaagcattgactaagaattatttatcgtttagtaacgcaatacaatcgtacaaggaaaccgtgcataaactaacacaagatgaaaaatttttagaggttgccgaatacatggacgaattaggagaacttataggcgtaaattatgacttagttcttaatccattatttcacggaggggaacccatcaaagatatggaaatcatttttttaaaactgtttaagaaaacagacttcaaagttgttaaaaaattaagtgttataagattacttatttgggcatacctaagcaagaaagatacaggcatagagtttgcggataatgatagacaaaatatatacactctatttcaacaaactggtagaatcgtccatagcaatctaacagaaacgtttagagattatatctttcccggagataagactagctattgggtgtggttaaacgaaagtatagctaatgatgcggatatcgttcttaatagacacgccattaccatgtatgataaaattcttagttatatatactctgagataaaacaaggacgcgttaataaaaacatgcttaagttagtttatatctttgagcctgaaaaagatatcagagaacttctgctagaaatcatatatgatattcctggagatatcctatctattattgatgcaaaaaacgacgattggaaaaaatattttattagtttttataaagctaattttattaacggtaatacatttattagtgatagaacgtttaacgaggacttattcagagttgttgttcaaatagatcccgaatatttcgataatgaacgaattatgtctttattctctacgagtgctgcggacattaaacgatttgatgagttagatattaataacagttatatatctaatataatttatgaggtgaacgatatcacattagatacaatggatgatatgaagaagtgtcaaatctttaacgaggatacgtcgtattatgttaaggaatacaatacatacctgtttttgcacgagtcggatcccatggtcatagagaacggaatactaaagaaactgtcatctataaaatccaagagtagacggctgaacttgtttagcaaaaacattttaaaatattatttagacggacaattggctcgtctaggtcttgtgttagatgattataaaggagacttgttagttaaaatgataaaccatcttaagtctgtggaggatgtatccgcattcgttcgattttctacagataaaaaccctagtattcttccatcgctaatcaaaactattttagctagttataatatttccatcatcgtcttatttcaaaggtttttgagagataatctatatcatgtagaagaattcttggataaaagcatccatctaaccaagacggataagaaatatatacttcaattgataagacacggtagatcatagaacagaccaaatatattattaataatttgtatatacatagatataattatcacacatttttgataaatgggaactgctgcaacaattcagactcccaccaaattaatgaataaagaaaatgcagaaatgattttggaaaaaattgttgatcatatagttatgtatattagtgacgaatcaagtgattcagaaaataatcctgaatatattgattttcgtaacagatacgaagactatagatctctcattataaaaagtgatcacgagtttgtaaagctatgtaaaaatcatgcggagaaaagttctccagaaacgcaacaaatgattatcaaacacatatacgaacaatatcttattccagtatctgaagtactattaaaacctataatgtccatgggtgacataattacatataacggatgtaaagacaatgaatggatgctagaacaactctctaccctaaactttaacaatctccgcacatggaactcatgtagcataggcaatgtaacgcgtctgttttatacattttttagttatctgatgaaagataaactaaatatataagtataatcccattctaatactttaacctgatgtattagcatcttattagaatattaacctaactaaaagacataacataaaaactcattacatagttgataaaaagcggtaggatataaatattatggctgccaccgttccgcgttttgacgacgtgtacaaaaatgcacaaagaagaattctagatcaagaaacattttttagtagaggtctaagtagaccgttaatgaaaaacacatatctatttgataattacgcgtatggatggataccagaaactgcaatttggagtagtagatacgcaaacctagatgctagtgactattatcccatttcgttgggattacttaaaaagttcgagtttctcatgtctctatataaaggtcctattcccgtatatgaagaaaaagtaaatactgaattcatagccaatggatcgttctctggtagatacgtatcatatcttcgaaagttttctgcccttccaacaaacgagtttattagttttttgttactgacttccattccaatctataatatcttgttctggtttaaaaacacacagtttgatattactaaacacacattattcagatacgtctatacagataatgccaaacacctggcgttggctaggtatatgcatcaaacaggagactataagcctttgtttagtcgtctcaaagagaattatatatttaccggtcccgttccaataagtatcaaagatatagatcaccctaatcttagtagagcaagaagtccatccgattatgagacattagctaatattagtactatattgtactttaccaagtatgatccggtattaatgtttttattgttttacgtacctgggtattcaattactacaaaaattactccagccgtagaatatctaatggataaactgaatctaacaaagagcgacgtacaactgttgtaaattattttatgcttcgtaaaatgtaggttttgaaccaaacattctttcaaagaatgagatgcataaaactttattatccaatagattgactatttcggacgtcaatcgtttaaagtaaacttcgtaaaatattctttgatcactgccgagtttaaaacttctatcgataattgtctcatatgttttaatatttacaagttttttggtccatggtacattagccggacaaatatatgcaaaataatatcgttctccaagttctatagtttctggattatttttattatattcagtaactaaatacatattagggttatctgcggatttataatttgagtgatgcattctactcaacataaataattctagaggagacgatctactatcaaattcggatcgtaaatctgtttctaaagaacggagaatatctatacatacctgattagaattcatccgtccttcagacaacatctcagacagtctggttttgtacatcttaatcatattcttatgaaacttggaaacatctcttctagtttcactagtacctttattaattctctcaggtacagattttgaattcgacgatgctgagtatttcatcgttgtatatttcttcttcgattgcataatcagattcttatataccgcctcaaactctattttaaaattattaaacaatactctattattaatcagtcgttctaactctttcgctatttctatagacttatctacatcttgactgtctatctctgtaaacacggagtcggtatctccatacacgctacgaaaacgaaatctgtaatctataggcaacgatgttttcacaatcggattaatatctctatcgtccatataaaatggattacttaatggattggcaaaccgtaacataccgttagataactctgctccatttagtaccgattctagatacaagatcattctacgtcctatggatgtgcaactcttagccgaagcgtatgagtatagagcactatttctaaatcccatcagaccatatactgagttggctactatcttgtacgtatattgcatggaatcatagatggccttttcagttgaactggtagcctgttttagcatctttttatatctggctctctctgccaaaaatgttcttaatagtctaggaatggttccttctatcgatctatcgaaaattgctatttcagagatgaggttcggtagtctaggttcacaatgaaccgtaatatatctaggaggtggatatttctgaagcaatagctgattatttatttcttcttccaatctattggtactaacaacgacaccgactaatgtttccggagatagatttccaaagatacacacattaggatacagactgttataatcaaagattaatacattattactaaacattttttgttttggagcaaataccttaccgccttcataaggaaacttttgttttgtttctgatctaactaagatagttttagtttccaacaatagctttaacagtggacccttgatgactgtactcgctctatattcgaataccatggattgaggaagcacatatgttgacgcacccgcgtctgtttttgtttctactccataatactcccacaaatactgacacaaacaagcatcatgaatacagtatctagccatatctaaagctatgtttagattataatccttatacatctgagctaaatcaacgtcatcctttccgaaagataatttatatgtatcattaggtaaagtaggacataatagtacgactttaaatccattttcccaaatatctttacgaattactttacatataatatcctcatcaacagtcacataattacctgtggttaaaacctttgcaaatgcagcggctttgcctttcgcgtctgtagtatcgtcaccgatgaacgtcatttctctaactcctctatttaatactttacccatgcaactgaacgcgttcttggatatagaatccaatttgtacgaatccaatttttcaaatttttgaatgaatgaatatagatcgaaaaatatagttccattattgttattaacgtgaaacgtagtattggccatgccgcctactcccttatgactagactgatttctctcataaatacagagatgtacagcttcctttttgtccggagatctaaagataattttctctcctgttaataactctagacgattagtaatatatctcagatcaaagttatgtccgttaaaggtaacgacgtagtcgaacgttagttccaacaattgtttagctattcgtaacaaaactatttcagaacatagaactagttctcgttcgtaatccatttccattagtgactgtatcctcaaacatcctctatcgacggcttcttgtatttcctgttccgttaacatctcttcattaatgagcgtaaacaataatcgtttaccacttaaatcgatataacagtaacttgtatgcgagattgggttaataaatacagaaggaaacttcttatcgaagtgacactctatatctagaaataagtacgatcttgggatatcgaatctaggtatttttttagcgaaacagttacgtggatcgtcacaatgataacatccattgttaatctttgtcaaatattgctcgtccaacgagtaacatccgtctggagatatcccgttagaaatataaaaccaactaatattgagaaattcatccatggtggcattttgtatgctgcgtttctttggctcttctatcaaccacatatctgcgacggagcattttctatctttaatatctagattataacttattgtctcgtcaatgtctatagttctcatctttcccaacggcctcgcattaaatggaggaggagacaatgactgatatatttcgtccgtcactacgtaataaaagtaatgaggaaatcgtataaatacggtctcgccatttcgacatctggatttcagatataaaaatctgttttcaccgtgactttcaaaccaattaatgcaccgaacatccatttatagaatttagaaatatattttcatttaaatgaatcccaaacattggggaagagccgtatggaccattatttttatagtactttcgcaagcgggtttagacggcaacatagaagcgtgtaaacgaaaactatatactatagttagcactcttccatgtcctgcatgtagacggcacgcgactatcgctatagaggacaataatgtcatgtctagcgatgatctgaattatatttattattttttcatcagattatttaacaatttggcatctgatcccaaatacgcgatcgatgtgacaaaggttaaccctttataaacttaacccattataaaacttatgattagtcacaactgaaataaccgcgtgattattttttggtataattctacacggcatggtttctgtgactatgaattcaacccccgttacattagtgaaatctttaacaaacagcaagggttcgtcaaagacataaaactcattgtttacaatcgaaatagaccccctatcacacttaaaataaaaaatatccttatcctttaccaccaaataaaattctgattggtcaatgtgaatgtattcacttaacagttccacaaatttatttattaactccgaggcacatacatcgtcggtattttttatggcaaactttactcttccagcatccgtttctaaaaaaatattaacgagttccatttatatcatccaatattattgaaatgacgttgatggacagatgatacaaataagaaggtacggtacctttgtccaccatctcctccaattcatgctctattttgtcattaactttaatgtatgaaaacagtacgccacatgcttccatgacagtgtgtaacactttggatacaaaatgtttgacattagtataattgtccaagactgtcaatctataatagatagtagctataatatattctatgatggtattgaagaagatgacaaccttggcatattgatcatttaacacagacatggtatcaacagatagcttgaatgaaagagaatcagtaattggaataagcgtcttctcgatagagtgtccgtataccaacatgtctgatattttgatgtattccattaaattatttagttttttctttttattctcgttaaacagcatttctgtcaacggaccccaacatcgttgaccgattaagttttgattgatttttccgtgtaaggcgtatctagtcagatcgtatagcctatccaataatccatcgtctgtgtgtagatcacatcgtacactttttaattctctatagaagagcgacagacatctggagcaattacagacagcaatttctttattctctacagatgtaagatacttgaagacattcctatgatgatgcagaattttggataacacggtattgatggtatctgttaccataattcctttgatggctgatagtgtcagagcacaagatttccaatctttgacaatttttagcaccattatctttgttttgatatctatatcagacagcatggtgcgtctgacaacacagggattaagacggaaagatgaaatgattctctcaacatcttcaatagataccttgctattttttctggcattatctatatgtgcgagaatatcctctagagaatcagtatcctttttgatgatagtggatctcaatgacatgggacgtttaaaccttcttattctatcaccagattgcatggtgatttgtcttctttcttttatcataatgtaatctctaaattcatcggcaaattgtctatatctaaaatcataatatgagatgtttacctctacaaatatctgttcgtccaatgttagagtatttacatcagttttgtattccaaattaaacatggcaacggatttaattttatattcctctattaagtcctcgtcgataataacagaatgtagataatcatttaatccgtcgtacatggttggaagatgcttgttgacaaaatctttaattgtcttgatgaaggtgggactatatctaacatcttgattaataaaatttataacattgtccataggatactttgtaactagttttatacacatctcttcatcggtaagtttagacagaatatcgtgaacaggtggtatattatattcatcagatatacgaagaacaatgtccaaatctatattgtttaatatattatatagatgtagcgtagctcctacaggaatatctttaactaagtcaatgatttcatcaaccgttagatctattttaaagttaatcatataggcattgatttttaaaaggtatgtagccttgactacattctcattaattaaccattccaagtcattgtgtgtaagaagattatattctatcataagcttgactacatttggtcccgataccattaaagaattcttatgatataaggaaacagattttaggtactcatctactctacaagaattttggagagccttaacgatatcagtgacgtttattatttcaggaggaaagaatctaacattgagaatatcggaattaatagcttccagatacagtgattttggcaatagtccgtgtaatccataatccagtaacacgagctggtgcttgctagacaccttttcaatgtttaatttttttgaaataagctttgataaagccttcctcgcaaattccggatacatgaacatgtcggcgacatgattaagtattgttttttcattatttttatattttctcaacaagttctcaataccccaatagatgatagaatatcacccaatgcgtccatgttgtctatttccaacaggtcgctatatccaccaatagaagtttttccaaaaaagattctaggaacagttctaccaccagtaatttgttcaaaataatcccgcaattcattttcgggtttaaattctttaatatcgacaatttcatacgctcctcttttgaaactaaacttatttagaatatccagtgcatttctacaaaaaggacatgtatacttgacaaaaattgtcactttgttattggccaacctttgttgtacaaattcctcggccattttaatatttaagtgatataaaactatctcgacttatttaactctttagtcgagatatatggacgcagatagctatatgatagccaactacagaaggcaaacgctataaaaaacataattacgacgagcatatttataaatatttttattcagcattacttgatatagtaatattaggcacagtcaaacattcaaccactctcgatacattaactctctcattttctttaacaaattctgcaatatcttcgtaaaaagattcttgaaactttttagaatatctatcgactctagatgaaatagcgttcgtcaacatactatgttttgtatacataaaggcgcccattttaacagtttctagtgacaaaatgctagcgatcctaggatcctttagaatcacatagattgacgattcgtctctcttagtaactctagtaaaataatcatacaatctagtacgcgaaataatattatccttgacttgaggagatctaaacaatctagttttgagaacatcgataagttcatcgggaatgacatacatactatctttaatagaactcttttcatccagttgaatggattcgtccttaaccaactgattaatgagatcttctattttatcattttccagatgatatgtatgtccattaaagttaaattgtgtagcgcttctttttagtctagcagccaatactttaacatcactaatatcgatatacaaaggagatgatttatctatggcattaagaattcgtttttcgacatccgtcaaaaccaattcctttttgcctgtatcatccagttttccatcctttgtaaagaaattattttctactagactattaataagactgataaggattcctccataattgcacaatccaaactttttaacaaaactagactttacgagatctacaggaatgcgtacttcaggttttttagcttgtgattttttcttttgcggacattttctagtaaccaactcatctaccatttcattgattttagcagtgaaataagctttcaatgcacgggcactgatactattgaaaacgagttgatcttcaaattccgccatttaagttcaccaaacaacttttaaatacaaatatatcaatagtagtagaataagaactataaaaaaaataataattaaccaaccccaacaaccggtattattagttgatgtggtagttttctcatcacttagaacagatttaacaatttctataaagtctgtcaaatcatcttccggagaccccataaatacaccaaatatagcggcgtacaacttatccatttatacattgaatattggcttttctttatcgctatcttcatcatattcatcatcaatatcaacaagtcccagattacgagccagatcttcttctacattttcagtcattgatacacgttcactatctccagagagtccgataacgttagccaccacttctctatcaatgattagtttcttgagcgcgaaagtaatttttgtttccgttccggatctatagaagacgataggtgtgataattgccttggccaattgtctttctcttttactgagtgattctagttcaccttctatagatctgagaatggatgattctccagtcgaaacatattctaccatggatccgtttaatttgttgatgaagatggattcatccttaaatgttttctctgtaatagtttccaccgaaagactatgcaaagaatttggaatgcgttccttgtgcttaatgtttccatagacggcttctagaagttgatacaacataggactagccgcggtaacttttatttttagaaagtatccatcgcttctatcttgtttagatttatttttataaagtttagtctctccttccaacataataaaagtggaagtcatttgactagataaactatcagtaagttttatagagatagacgaacaattagcgtattgagaagcatttagtgtaacgtattcgatacattttgcattagatttactaatcgattttgcatactctataacacccgcacaagtctgtagagaatcgctagatgcagtaggtcttggtgaagtttcaactctcttcttgattaccttactcatgattaaacctaaataattgtactttgtaatataatgatatatattttcactttatctcatttgagaataaaaatgtttttgtttaaccactgcatgatgtacagatttcggaatcgcaaaccaccagtggttttattttatccttgtccaatgtgaattgaatgggagcggatgcgggtttcgtacgtagatagtacattcccgtttttagaccgagactccatccgtaaaaatgcatactcgttagtttggaataactcggatctgctatatggatattcatagattgactttgatcgatgaaggctcccctgtctgcagccatttttatgatcgtcttttgtggaatttcccaaatagttttataaactcgcttaatatcttctggaaggtttgtattctgaatggatccaccatctgccataatcctattcttgatctcatcattccataattttctctcggttaaaactctaaggagatgcggattaactacttgaaattctccagacaatactctccgagtgtaaatattactggtatacggttccaccgactcattatttcccaaaatttgagcagttgatgcagtcggcataggtgccaccaataaactatttctaagaccgtatgttctgattttatcttttagaggttcccaattccaaagatccgacggtacaacattccaaagatcatattgtagaataccgttactggcgtacgatcctacatatgtatcgtatggtccttccttctcagctagttcacaactcgcctctaatgcaccgtaataaatggtttcgaagatcttcttatttagatcttgtgcttccaggctatcaaatggataatttaagagaataaacgcgtccgctaatccttgaacaccaataccgataggtctatgtctcttattagagatttcagcttctggaataggataataattaatatctataattttattgagatttctgacaattactttgaccacatccttcagtttgagaaaatcaaatcgcccatctattacaaacatgttcaaggcaacagatgccagattacaaacggctacctcattagcatccgcatattgtattatctcagtgcaaagattactacacttgatagttcctaaattttgttgattactctttttgttacacgcatccttataaagaatgaatggagtaccagtttcaatctgagattctataatcgctttccagacgactcgagcctttattatagatttgtatctcctttctctttcgtatagtgtatacaatcgttcgaactcgtctccccaaacattgtccaatccaggacattcatccggacacatcaacgaccactctccgtcatccttcactcgtttcataaagagatcaggaatccaaagagctataaatagatctctggttctatgttcctcgtttcctgtattctttttaagatcgaggaacgccataatatcagaatgccacggttccaagtatatggccataactccaggccgtttgtttcctccctgatctatgtatctagcggtgttattataaactctcaacattggaataataccgtttgatataccattggtaccggagatatagcttccactggcacgaatattactaattgatagacctattccccctgccattttagagattaatgcgcatcgttttaacgtgtcatagataccctctatgctatcatcgatcatgttaagtagaaaacagctagacatttggtgacgactagttcccgcattaaataaggtaggagaagcgtgcgtaaaccatttttcagaaagtagattgtacgtctcaatagctgagtctatatcccattgatgaattcctactgcgacacgcattaacatgtgctgaggtctttcaacgatcttgttgtttattttcaacaagtaggatttttccaaagttttaaaaccaaaatagttgtatgaaaagtctcgttcgtaaataataaccgagttgagtttatccttatatttgttaactatatccatggtgatacttgaaataatcggagaatgtttcccatttttaggattaacatagttgaataaatcctccatcacttcactaaatagtttttttgtttccttgtgtagatttgatacggctattctggcggctagaatggcataatccggatgttgtgtagtacaagtggctgctatttcggctgccagagtgtccaattctaccgttgttactccattatatattccttgaataaccttcatagctattttaataggatctatatgatccgtgtttaagccataacataattttctaatacgagacgtgattttatcaaacatgacattttccttgtatccatttcgtttaatgacaaacatttttgttggtgtaataaaaaaattatttaacttttcattaatagggatttgacgtatgtagcgtacaaaatgattgttcctggtatatagataaagagtcctatatatttgaaaatcgttacggctcgattaaactttaatgattgcatagtgaatatatcattaggatttaactccttgactatcatggcggcgccagaaattaccatcaaaagcattaatacagttataccgatcgcagttagaacggttatagcatccaccatttatatctaaaaattagatcaaagaatatgtgacaaagtcctagttgtatactgagaattgacgaaacaatgtttcttacatatttttttcttattagtaaccgacttaatagtaggaactggaaaactagacttgattattctataagtatagatacccttccaaataatattctctttgataaaagttccagaaaatgtagaattttttaaaaagttatcttttgctattaccaagattgtgtttagacgcttattattaatatgagtgatgaaatccacaccgcctctagatatcgcctttatttccacattagatggtaaatccaatagtgaaactatctttttaggaatgtatggactcgcgtttagaggagtaaacgtcttaggcgtcggaaaggatgattcatcaaacgaataaacaatttcacaaatggatgttaatgtattagtaggaaattttttgacgctattggaattgaagattctaatggatgatgttctacctatttcatccgataacatgttaatttccgacaccaacggttttaatatttcgatgatatacggtagtctctctttcggacttatatagcttattccacaatacgagtcattatatactccaaaaaacaaaataactagtataaaatctgtatcgaatgggaaaaacgaaattatcgacataggtatagaatccggaacattgaacgtattaatacttaattctttttctgtggtaagtaccgataggttattgacattgtatggttttaaatattctataacttgagacttgatagatattagtgatgaattgaaaattatttttatcaccacgtgtgtttcaggatcatcgtcgacgcccgtcaaccaaccgaacggagtaaaataaatatcattaatatatgctctagatattagtatttttatcaatcctttgattatcatcttctcgtaggcgaatgattccatgatcaagagtgatttaagaacatcctccggagtattaatgggcttagtaaacagtccatcgttgcaataataaaagttatccaagttaaaggatattatgcattcgtttaaagatatcacctcatctgacggagacaattttttggtaggttttagagactttgaagctacttgtttaacaaagttattcatcgtcgtctactattctatttaattttgtagttaatttatcacatatcacattaattgactttttggtccacttttccatacgtttatattcttttaatcctgcgttatccgtttccgttatatccagggatagatcttgcaagttaaatagaatgctcttaaataatgtcattttcttatccgctaaaaatttaaagaatgtataaacctttttcagagatttgaaactcttaggtggtgtcctagtacacaatatcataaacaaactaataaacattccacattcagattccaacagctgattaacttccacattaatacagcctattttcgctccaaatgtacattcgaaaaatctgaataaaacatcgatgtcacaatttgtattatccaatacagaatgtttgtgattcgtgttaaaaccatcggagaaggaatagaaataaaaattattatagtggtggaattcagttggaatattgcctccggagtcataaaaggatactaaacattgttttttatcataaattacacatttccaatgagacaaataacaaaatccaaacattacaaatctagaggtagaacttttaattttgtctttaagtatatacgataagatatgtttattcataaacgcgtcaaatttttcatgaatcgctaaggagtttaagaatctcatgtcaaattgtcctatataatccacttcggatccataagcaaactgagagactaagttcttaatacttcgattgctcatccaggctcctctctcaggctctattttcatcttgacgacctttggattttcaccagtatgtattcctttacgtgataaatcatcgattttcaaatccatttgtgagaagtctatcgccttagatactttttcccgtagtcgaggtttaaaaaaatacgctaacggtatactagtaggtaactcaaagacatcatatatagaatggtaacgcgtctttaactcgtcggttaactctttcttttgatcgagttcgtcgctactattgggtctgctcaggtgccccgactctactagttccaacatcataccgataggaatacaagacactttgccggcggttgtagatttatcatatttttccactacatatccgttacaatttgttaaaaatttagatacatctatattgctacataatccagctagtgaatatatatgacataataaattggtaaatcctagttctggtattttactaattactaaatctgtatatctttccatttatcatggaaaagaatttaccagatatcttcttttttccaaactgcgttaatgtattctcttacaaatattcacaagatgaattcagtaatatgagtaaaacggaacgtgatagtttctcattggccgtgtttccagttataaaacatagatggcataacgcacacgttgtaaaacataaaggaatatacaaagttagtacagaagcacgtggaaaaaaagtatctcctccatcactaggaaaacccgcacacataaacctaaccgcgaagcaatatatatacagtgaacacacaataagctttgaatgttatagttttctaaaatgtataacaaatacagaaatcaattcgttcgatgagtatatattaagaggactattagaagctggtaatagtttacagatattttccaattccgtaggtaaacgaacagatactataggtgtactagggaataagtatccatttagcaaaattccattggcctcattaactcctaaagcacaacgagagatattttcagcgtggatttctcatagacctgtagttttaactggaggaactggagtgggtaagacgtcacaggtacccaagttattgctttggtttaattatttatttggtggattctctactctagataaaatcactgactttcacgaaagaccagtcattctatctcttcctaggatagctttagttagattgcatagcaataccattttaaaatcattgggatttaaggtactagatggatctcctatttctttacggtacggatctataccggaagaattaataaacaaacaaccaaaaaaatatggaattgtattttctacccataagttatctctaacaaaactatttagttatggcactcttattatagacgaagttcatgagcatgatcaaataggagatattattatagcagtagcgagaaagcatcatacgaaaatagattctatgtttttaatgactgccacgttagaggatgacagggaacggctaaaagtatttttacctaatcccgcatttatacatattcctggagatacactgtttaaaattagcgaggtatttattcataataagataaatccatcttccagaatggcatacatagaagaagaaaagagaaatttagttactgctatacagatgtatactcctcctgatggatcatccggtatagtctttgtggcatccgttgcacagtgtcacgaatataaatcatatttagaaaaaagattaccgtatgatatgtatattattcatggtaaggtcttagatatagacgaaatattagaaaaagtgtattcatcacctaatgtatcgataattatttctactccttatttggaatccagcgttactatacgcaatgttacacacatttatgatatgggtagagtttttgtccccgctccttttggaggatcgcaacaatttatttctaaatctatgagagatcaacgaaaaggaagagtaggaagagttaatcctggtacatacgtctatttctatgatctgtcttatatgaagtctatacagcgaatagattcagaatttctacataattatatattgtacgctaataagtttaatctaacactccccgaagatttgtttataatccctacaaatttggatattctatggcgtacaaaggaatatatagactcgttcgatattagtacagaaacatggaataaattattatccaattattatatgaagatgatagagtatgctaaactttatgtactaagtcctattctcgctgaggagttggataactttgagaggacgggagaattaactagtattgtacgagaagccattttatctctaaatttacaaattaagattttaaattttaaacataaagatgatgatacgtatatacacttttgtaaaatattattcggtgtctataacggaacaaacgctactatatattatcatagacctctaacgggatatatgaatatgatttcagatactatatttgttcctgtagataataactaaaaatcaaactctaatgaccacatctttttttagagatgaaaaattttccacatctccttttgtagacacgactaaacattttgcagaaaaaagtttattagtgtttagataatcgtatacttcatcagtgtagatagtaaatgtgaacagataaaaggtattcttgctcaatagattggtaaattccatagaatatattaatcctttcttcttgagatcccacatcatttcaaccagagacgttttatccaatgatttacctcgtactataccacatacaaaactagattttgcagtgacgtcgtacctggtattcctaccaaacaaaattttacttttagttcttttagaaaattctaaggtagaatctctatttgccaatatgtcatctatggaattaccactagcaaaaaatgatagaaatatatattgatacatcgcagctggttttgatctactatactttaaaaacgaatcagattccataattgcctgtatatcatcagctgaaaaactatgttttacacgtattccttcggcatttctttttaatgatatatcttgtttagacaatgataaagttatcatgtccatgagagacgcgtctccgtatcgtataaatatttcattagatgttagacgcttcattaggggtatacttctataaggtttcttaatcagtccatcattggttgcgtcaagaactactatcggatgttgttgggtatctctagtgttacacatggccttactaaagtttgggtaaataactatgatatctctattaattatagatgcatatatttcattcgtcaaggatattagtatcgacttgctatcgtcattaatacgtgtaatgtaatcatataaatcatgcgatagccaaggaaaatttaaatagatgttcatcatataatcgtcgctataattcatattaatacgttgacattgactaatttgtaatatagcctcgccacgaagaaagctctcgtattcagtttcatcgataaaggataccgttaaatataactggttgccgatagtctcatagtctattaagtggtaagtttcgtacaaatacagaatccctaaaatattatctaatgttggattaatctttaccataactgtataaaatggagacggagtcataactattttaccgtttgtacttactggaatagatgaaggaataatctccggacatgctggtaaagacccaaatgtctgtttgaagaaatccaatgttccaggtcctaatctcttaacaaaaattacgatattcgatcccgatatcctttgcattctatttaccagcatatcacgaactatattaagattatctatcatgtctattctcccaccgttatataaatcgcctccgctaagaaacgttagtatatccatacaatggaatacttcatttctaaaatagtattcgttttctaattctttaatgtgaaatcgtatactagaaagggaaaaattatctttgagttttccgttagaaaagaaccacgaaactaatgttctgattgcgtccgattccgttgctgaattaatggatttacaccaaaaactcatataacttctagatgtagaagcattcgctaaaaaattagtagaatcaaaggatataagtagatgttccaacaagtgagcaattcccaagatttcatctatatcattctcgaatccgaaattagaaattcccaagtagatatcctttttcatccgatcgttgatgaaaatacgaactttattcggtaagacaatcatttactaaggagtaaaataggaagtaatgttcgtatgtcgttatcatcgtataaattaaaggtgtgttttttaccattaagtgacattataattttaccaatattggaattataatataggtgtatttgcgcactcgcgacggttgatgcatcggtaaatatagctgtatctaatgttctagtcggtatttcatcatttcgctgtctaataatagcgttttctctatctgtttccattacagctgcctgaagtttattggtcggataatatgtaaaataataagaaatacatacgaataacaaaaataaaataagatataataaagatgccatttagagatctaattttgtttaacttgtccaaattcctacttacagaagatgaggaatcgttggagatagtgtcttccttatgtagaggatttgaaatatcttataatgacttgataacttactttccagataggaaataccataaatatatttataaagtatttgaacatgtagatttatcggaggaattaagtatggaattccatgatacaactctgagagatttagtctatcttagattgtacaagtattccaagtgtatacggccgtgttataaattaggagataatctaaaaggcatagttgttataaaggacaggaatatttatattagggaagcaaatgatgacttgatagaatatctcctcaaggaatacactcctcagatttatacatattctaatgagcgcgtccccataactggttcaaaattaattctttgtggattttctcaagttacatttatggcgtatacaacgtcgcatataacaacaaataaaaaggtagatgttctcgtttccaaaaaatgtatagatgaactagtcgatccaataaattatcaaatacttcaaaatttatttgataaaggaagcggaacaataaacaaaatactcaggaagatattttattcggtaacaggtggccaaactccataggtagctttttctatttcggattttagaatttccaaattcaccagcgatttatcggttttggtgaaatccaaggatttattaatgtccacaaatgccatttgttttgtctgtggattgtatttgaaaatggaaacgatgtagttagatagatgcgctgcgaagtttcctattagggttccgcgcttcacgtcacccagcatacttgaatcaccatcctttaaaaaaaatgataagatatcaacatggagtatatcatactcgaattttaattcttctactgactcactgacattttcacaaatactacaatacggtttaccgaaaataatcagtacgttcttcatttatgggtatcaaaaacttaaaatcgttactgctggaaaataaatcactgacgatattagatgataatttatacaaagtatacaatggaatatttgtggatacaatgagtatttatatagccgtcgccaattgtgtcagaaacttagaagagttaactacggtattcataaaatacgtaaacggatgggtaaaaaagggagggcatgtaaccctttttatcgatagaggaagtataaaaattaaacaagacgttagagacaagagacgtaaatattctaaattaaccaaggacagaaaaatgttagaattagaaaagtgtacatccgaaatacaaaatgttaccggatttatggaagaagaaataaaggcagaaatgcaattaaaaatcgataaactcacatttcaaatatatttatctgattctgataacataaaaatatcattgaatgagatactaacacatttcaacaataatgagaatgttacattattttattgtgatgaacgagacgcagaattcgttatgtgtctcgaggctaaaacacatttctctaccacaggagaatggccgttgataataagtaccgatcaggatactatgctatttgcatctgctgataatcatcctaagatgataaaaaacttaactcaactgtttaaatttgttccctcggcagaggataactatttagcaaaattaacggcgttagtgaatggatgtgatttctttcctggactctatggggcatctataacacccaccaacttaaacaaaatacaattgtttagtgattttacaatcgataatatagtcactagtttggcaattaaaaattattatagaaagactaactctaccgtagacgtgcgtaatattgttacgtttataaacgattacgctaatttagacgatgtctactcgtatattcctccttgtcaatgcactgttcaagaatttatattttccgcattagatgaaaaatggaatgaatttaaatcatcttatttagaaagcgtgccgttaccctgccaattaatgtacgcgttagaaccacgcaaggagattgatgtttcagaagttaaaactttatcatcttatatagatttcgaaaatactaaatcagatatcgatgttataaaatctatatcctcgatcttcggatattctaacgaaaactgtaacacgatagtattcggcatctataaggataatttactactgagtataaataattcattttactttaacgatagtctgttaataaccaatactaaaagtgataatataataaatataggttactagattaaaaatggtgttccaactcgtgtgctctacatgcggtaaagatatttctcacgaacgatataaattgattatacgaaaaaaatcattaaaggatgtactcgtcagtgtaaagaacgaatgttgtaggttaaaattatctacacaaatagaacctcaacgtaacttaacagtgcaacctctattggatataaactaatatggatccggttaattttatcaagacatatgcgcctagaggttctattatttttattaattataccatgtcattaacaagtcatttgaatccatcgatagaaaaacatgtgggtatttattatggtacgttattatcggaacacttggtagttgaatctacctatagaaaaggagttcgaatagtcccattggatagtttttttgaaggatatcttagtgcaaaagtatacatgttagagaatattcaagttatgaaaatagcagctgatacgtcattaactttattgggtattccgtatggatttggtcatgatagaatgtattgttttaaattggtagctgactgttataaaaatgccggtattgatacatcgtctaaacgaatattgggcaaagatatttttctgagccaaaacttcacagacgataatagatggataaagatatatgattctaataatttaacattttggcaaattgattaccttaaagggtgagttaatatgcataactactcctccgttgttttttccctcgttctttttcttaacgttgtttgccatcactctcataatgtaaagatattctaaaatggtaaacttttgcatatcggacgcagaaattggtataaatgttgtaattgtattatttcccgtcaatggactagtcacagctccatcagttttatatcctttagagtatttctcactcgtgtctaacattctagagcattccatgatctgtttatcgttgatattggccggaaagatagattttttattttttattatattactattggcaattgtagatataacttctggtaaatatttttctaccttttcaatctcttctattttcaagccggctatatattctgctatattgttgctagtatcaataccttttctggctaagaagtcatatgtggtattcactatatcagttttaactggtagttccattagcctttccacttctgcagaataatcagaaattggttctttaccagaaaatccagctactataataggctcaccgatgatcattggcaaaatcctatattgtaccagattaatgagagcatatttcatttccaataattctgctagttcttgagacattgatttatttgatgaatctagttggttctctagatactctaccatttctgccgcatacaataacttgttagataaaatcagggttatcaaagtgtttagcgtggctagaatagtgggcttgcatgtattaaagaatgcggtagtatgagtaaaccgttttaacgaattatatagtctccagaaatctgtggcgttacatacatgagccgaatgacatcgaagattgtccaatatttttaatagctgctctttgtccattatttctatatttgactcgcaacaattgtagataccattaatcaccgattcctttttcgatgccggacaatagcacaattgtttagctttggactctatgtattcagaattaatagatatatctctcaatacagattgcactatacattttgaaactatgtcaaaaattgtagaacgacgctgttctgcagccatttaactttaaataatttacaaaaatttaaaatgagcatccgtataaaaatcgataaactgcgccaaattgtggcatatttttcagagttcagtgaagaagtgtctataaatgtagactcgacggatgagttaatgtatatttttgccgccttgggcggatctgtaaacatttgggcaattatacctctaagtgcatcagtgttttaccgaggagccgaaaatattgtgtttaatcttcctgtgtccaaggtaaaatcgtgtttgtgtagttttcacaatgatgccatcatagatatagaacctgatctggaaaataatctagtaaaactttctagttatcatgtagtaagtgtcgattgtaacaaggaactgatgcctattaggacagatactactatttgtctaagtatagatcaaaagaaatcttacgtgtttaattttcacaagtatgaagaaaaatgttgtggtagaaccgtcattcatctagaatggttgttgggctttatcaagtgtattagtcagcatcagcatctggctattatgtttaaagatgacaatattattatgaagactcctggtaatactgatgcgttttccagggaatattctatgactgaatgttctcaagaactacaaaagttttctttcaaaatagctatctcgtctctcaacaaactacgaggattcaaaaagagagtcaatgtttttgaaactagaatcgtaatggataatgacgataacattttaggaatgttgttttcggatagagttcaatcctttaagatcaacatctttatggcgtttttagattaatactttcaatgagataaatatgggtggcggagtaagtgttgagctccctaaacgggatccgcctccgggagtacccactgatgagatgttattaaacgtggataaaatgcatgacgtgatagctcccgctaagcttttagaatatgtgcatataggaccactagcaaaagataaagaggataaagtaaagaaaagatatccagagtttagattagtcaacacaggacccggtggtctttcggcattgttaagacaatcgtataatggaaccgcacccaattgctgtcgcacttttaatcgtactcattattggaagaaggatggaaagatatcagataagtatgaagagggtgcagtattagaatcgtgttggccagacgttcacgacactggaaaatgcgatgttgatttattcgactggtgtcagggggatacgttcgatagaaacatatgccatcagtggatcggttcagcctttaataggagtaatagaactgtagagggtcaacaatcgttaataaatctgtataataagatgcaaacattatgtagtaaagatgctagtgtaccaatatgcgaatcatttttgcattatttacgcgcacacaatacagaagatagcaaagagatgatcgattatattctaagacaacagtctgcggactttaaacagaaatatatgagatgtagttatcccactagagataagttagaagagtcattaaaatatgcggaacctcgagaatgttgggatccagagtgttcgaatgccaatgttaatttcttactaacacgtaattataataatttaggactttgcaatattgtacgatgtaataccagcgtgaacaacttacagatggataaaacttcctcattaagattgtcatgtggattaagcaatagtgatagattttctactgttcccgtcaatagagcaaaagtagttcaacataatattaaacactcgttcgacctaaaattgcatttgatcagtttattatctctcttggtaatatggatactaattgtagctatttaaatgggtgccgcggcaagcatacagacgacggtgaatacactcagcgaacgtatctcgtctaaattagaacaagaagcgaacgctagtgctcaaacaaaatgtgatatagaaatcggaaatttttatatccgacaaaaccatggatgtaacctcactgttaaaaatatgtgctctgcggacgcggatgctcagttggatgctgtgttatcagccgctacagaaacatatagtggattaacaccggaacaaaaagcatacgtgccagctatgtttactgctgcgttaaacattcagacgagtgtaaacactgttgttagagattttgaaaattatgtgaaacagacttgtaattctagcgcggtcgtcgataacaaattaaagatacaaaacgtaatcatagatgaatgttacggagccccaggatctccaacaaatttggaatttattaatacaggatctagcaaaggaaattgtgccattaaagcgttgatgcaattgacgactaaggccactactcaaatagcacctagacaagttgctggtacaggagttcagttttatatgattgttatcggtgttataatattggcagcgttgtttatgtactatgccaagcgtatgttgttcacatccaccaatgataaaatcaaacttattttagccaataaggaaaacgtccattggactacttacatggacacattctttagaacttctccgatggttattgctaccacggatatgcaaaactgaaaatatattgataatattttaatagattaacatggaagttatcgctgatcgtctagacgatatagtgaaacaaaatatagcggatgaaaaatttgtagattttgttatacacggtctagagcatcaatgtcctgctatacttcgaccattaattaggttgtttattgatatactattatttgttatagtaatttatatttttacggtacgtctagtaagtagaaattatcaaatgttgttggtggtgctagtcatcacattaactattttttattactttatactataatagtactagactgacttctaacaaacatctcacctgccataaataaatgcttgatattaaagtcttctatttctaacactattccatctgtggaaaataatactctgacattatcgctaattgacacatcggtgagtgatatgcctataaagtaataatcttctttgggcacatataccagtgtaccaggttctaacaacctatttactggtgctcctgtagcatactttttctttaccttgagaatatccatcgtttgcttggtcaatagcgatatgtgattttttatcaaccactcaaaaaagtaattggagtgttcatatcctctacgggctattgtctcatggccgtgtatgaaatttaagtaacacgactgtggtagatttgttctatagagccgattgccgcaaatagatagaactaccaatatgtctgtacaaatgttaaacattaattgattaacagaaaaaacaatgttcgttctgggaatagaaaccagatcaaaacaaaattcgttagaatatatgccacgtttatacatggaatataaaataactacagtttgaaaaataacagtatcatttaaacatttaacttgcggggttaatctcacaactttactgtttttgaactgttcaaaatatagcatcgatccgtgagaaatacgtttagccgcctttaatagaggaaatcccaccgcctttctggatctcaccaacgacgatagttctgaccagcaactcatttcttcatcatccacctgttttaacatataataggcaggagatagatatccgtcattgcaatattccttctcgtaggcacacaatctaatattgataaaatctccattctcttctctgcatttattatcttgtctcggtggctgattaggctgtggtcttggtttaggccttggtctatcgttgttgaatctattttggtcattaaatctttcatttcttcctggtatatttctatcacctcgtttggttggatttttgtctatattatcgtttgtaacatcggtacgggtattcatttatcacaaaaaaaacttctctaaatgagtctactgctagaaaacctcatcgaagaagataccatattttttgcaggaagtatatctgagtatgatgatttacaaatggttattgccggcgcaaaatccaaatttccaagatctatgctttctatttttaatatagtacctagaacgatgtcaaaatatgagttggagttgattcataacgaaaatatcacaggagcaatgtttaccacaatgtataatataagaaacaatttgggtctaggagatgataaactaactattgaagccattgaaaactatttcttggatcctaacaatgaagttatgcctcttattattaataatacggatatgactgccgtcattcctaaaaaaagtggtaggagaaagaataagaacatggttatcttccgtcaaggatcatcacctatcttgtgcattttcgaaactcgtaaaaagattaatatttataaagaaaatatggaatccgcgtcgactgagtatacacctatcggagacaacaaggctttgatatctaaatatgcgggaattaatgtcctgaatgtgtattctccttccacatccataagattgaatgccatttacggattcaccaataaaaataaactagagaaacttagtactaataaggaactagaatcgtatagttctagccctcttcaagaacccattaggttaaatgattttctgggactattggaatgtgttaaaaagaatattcctctaacagatattccgacaaaggattgattactataaatggagaatgttcctaatgtatactttaatcctgtgtttatagagcccacgtttaaacattctttattaagtgtttataaacacagattaatagttttatttgaagtattcgttgtattcattctaatatatgtattttttagatctgaattaaatatgttcttcatgcctaaacgaaaaatacccgatcctattgatagattacgacgtgctaatctagcgtgtgaagacgataaattaatgatctatggattaccatggatgacaactcaaacatctgcgttatcaataaatagtaaaccgatagtgtataaagattgtgcaaagcttttgcgatcaataaatggatcacaaccagtatctcttaacgatgttcttcgcagatgatgattcattttttaagtatttggctagtcaagatgatgaatcttcattatctgatatattgcaaatcactcaatatctagactttctgttattattattgatccaatcaaaaaataaattagaagctgtgggtcattgttatgaatctctttcagaggaatacagacaattgacaaaattcacagactttcaagattttaaaaaactgtttaacaaggtccctattgttacagatggaagggtcaaacttaataaaggatatttgttcgactttgtgattagtttgatgcgattcaaaaaagaatcctctctagctaccaccgcaatagatcctgttagatacatagatcctcgtcgcaatatcgcattttctaacgtgatggatatattaaagtcgaataaagtgaacaataattaattctttattgtcatcatgaacggcggacatattcagttgataatcggccccatgttttcaggtaaaagtacagaattaattagacgagttagacgttatcaaatagctcaatataaatgcgtgactataaaatattctaacgataatagatacggaacgggactatggacgcatgataagaataattttgaagcattggaagcaactaaactatgtgatgtcttggaatcaattacagatttctccgtgataggtatcgatgaaggacagttctttccagacattgttgaattagatcgataaaaattaattaattacccgggtaccaggcctagatctgtcgagatccggtggtggtgcaaatcaaagaactgctcctcagtggatgttgcctttacttctaggcctgtacggaagtgttacttctgctctaaaagctgctgcagggggggggggggggtgggggggccggttagggccgccatcccctcagagcgtcgggatatcgggtggcggctcgggacggaggacgcgctagtgttcttctgtgtggcagttcagaatgatggatcaagctagatcagcattctctaacttgtttggtggagaaccattgtcatatacccggttcagcctggctcggcaagtagatggcgataacagtcatgtggagatgaaacttgctgtagatgaagaagaaaatgctgacaataacacaaaggccaatgtcacaaaaccaaaaaggtgtagtggaagtatctgctatgggactattgctgtgatcgtctttttcttgattggatttatgattggctacttgggctattgtaaaggggtagaaccaaaaactgagtgtgagagactggcaggaaccgagtctccagtgagggaggagccaggagaggacttccctgcagcacgtcgcttatattgggatgacctgaagagaaagttgtcggagaaactggacagcacagacttcaccagcaccatcaagctgctgaatgaaaattcatatgtccctcgtgaggctggatctcaaaaagatgaaaatcttgcgttgtatgttgaaaatcaatttcgtgaatttaaactcagcaaagtctggcgtgatcaacattttgttaagattcaggtcaaagacagcgctcaaaactcggtgatcatagttgataagaacggtagacttgtttacctggtggagaatcctgggggttatgtggcgtatagtaaggctgcaacagttactggtaaactggtccatgctaattttggtactaaaaaagattttgaggatttatacactcctgtgaatggatctatagtgattgtcagagcagggaaaatcacctttgcagaaaaggttgcaaatgctgaaagcttaaatgcaattggtgtgttgatatacatggaccagactaaatttcccattgttaacgcagaactttcattctttggacatgctcatctggggacaggtgacccttacacacctggattcccttccttcaatcacactcagtttccaccatctcggtcatcaggattgcctaatatacctgtccagacaatctccagagctgctgcagaaaagctgtttgggaatatggaaggagactgtccctctgactggaaaacagactctacatgtaggatggtaacctcagaaagcaagaatgtgaagctcactgtgagcaatgtgctgaaagagataaaaattcttaacatctttggagttattaaaggctttgtagaaccagatcactatgttgtagttggggcccagagagatgcatggggccctggagctgcaaaatccggtgtaggcacagctctcctattgaaacttgcccagatgttctcagatatggtcttaaaagatgggtttcagcccagcagaagcattatctttgccagttggagtgctggagactttggatcggttggtgccactgaatggctagagggatacctttcgtccctgcatttaaaggctttcacttatattaatctggataaagcggttcttggtaccagcaacttcaaggtttctgccagcccactgttgtatacgcttattgagaaaacaatgcaaaatgtgaagcatccggttactgggcaatttctatatcaggacagcaactgggccagcaaagttgagaaactcactttagacaatgctgctttccctttccttgcatattctggaatcccagcagtttctttctgtttttgcgaggacacagattatccttatttgggtaccaccatggacacctataaggaactgattgagaggattcctgagttgaacaaagtggcacgagcagctgcagaggtcgctggtcagttcgtgattaaactaacccatgatgttgaattgaacctggactatgagaggtacaacagccaactgctttcatttgtgagggatctgaaccaatacagagcagacataaaggaaatgggcctgagtttacagtggctgtattctgctcgtggagacttcttccgtgctacttccagactaacaacagatttcgggaatgctgagaaaacagacagatttgtcatgaagaaactcaatgatcgtgtcatgagagtggagtatcacttcctctctccctacgtatctccaaaagagtctcctttccgacatgtcttctggggctccggctctcacacgctgccagctttactggagaacttgaaactgcgtaaacaaaataacggtgcttttaatgaaacgctgttcagaaaccagttggctctagctacttggactattcagggagctgcaaatgccctctctggtgacgtttgggacattgacaatgagttttaaatgtgatacccatagcttccatgagaacagcagggtagtctggtttctagacttgtgctgatcgtgctaaattttcagtagggctacaaaacctgatgttaaaattccatcccatcatcttggtactactagatgtctttaggcagcagcttttaatacagggtagataacctgtacttcaagttaaagtgaataaccacttaaaaaatgtccatgatggaatattcccctatctctagaattttaagtgctttgtaatgggaactgcctctttcctgttgttgttaatgaaaatgtcagaaaccagttatgtgaatgatctctctgaatcctaagggctggtctctgctgaaggttgtaagtggtcgcttactttgagtgatcctccaacttcatttgatgctaaataggagataccaggttgaaagaccttctccaaatgagatctaagcctttccataaggaatgtagctggtttcctcattcctgaaagaaacagttaactttcagaagagatgggcttgttttcttgccaatgaggtctgaaatggaggtccttctgctggataaaatgaggttcaactgttgattgcaggaataaggccttaatatgttaacctcagtgtcatttatgaaaagaggggaccagaagccaaagacttagtatattttcttttcctctgtcccttcccccataagcctccatttagttctttgttatttttgtttcttccaaagcacattgaaagagaaccagtttcaggtgtttagttgcagactcagtttgtcagactttaaagaataatatgctgccaaattttggccaaagtgttaatcttaggggagagctttctgtccttttggcactgagatatttattgtttatttatcagtgacagagttcactataaatggtgtttttttaatagaatataattatcggaagcagtgccttccataattatgacagttatactgtcggttttttttaaataaaagcagcatctgctaataaaacccaacagatactggaagttttgcatttatggtcaacacttaagggttttagaaaacagccgtcagccaaatgtaattgaataaagttgaagctaagatttagagatgaattaaatttaattaggggttgctaagaagcgagcactgaccagataagaatgctggttttcctaaatgcagtgaattgtgaccaagttataaatcaatgtcacttaaaggctgtggtagtactcctgcaaaattttatagctcagtttatccaaggtgtaactctaattcccattttgcaaaatttccagtacctttgtcacaatcctaacacattatcgggagcagtatcttccataatgtataaagaacaaggtagtttttacctaccacagtgtctgtatcggagacagtgatctccatatgttacactaagggtgtaagtaattatcgggaacagtgtttcccataattttcttcatgcaatgacatcttcaaagcttgaagatcgttagtatctaacatgtatcccaactcctataattccctatcttttagttttagttgcagaaacattttgtggtcattaagcattgggtgggtaaattcaaccactgtaaaatgaaattactacaaaatttgaaatttagcttgggtttttgttacctttatggtttctccaggtcctctacttaatgagatagtagcatacatttataatgtttgctattgacaagtcattttaactttatcacattatttgcatgttacctcctataaacttagtgcggacaagttttaatccagaattgaccttttgacttaaagcagagggactttgtatagaaggtttgggggctgtggggaaggagagtcccctgaaggtctgacacgtctgcctacccattcgtggtgatcaattaaatgtaggtatgaataagttcgaagctccgtgagtgaaccatcattataaacgtgatgatcagctgtttgtcatagggcagttggaaacggcctcctagggaaaagttcatagggtctcttcaggttcttagtgtcacttacctagatttacagcctcacttgaatgtgtcactactcacagtctctttaatcttcagttttatctttaatctcctcttttatcttggactgacatttagcgtagctaagtgaaaaggtcatagctgagattcctggttcgggtgttacgcacacgtacttaaatgaaagcatgtggcatgttcatcgtataacacaatatgaatacagggcatgcattttgcagcagtgagtctcttcagaaaacccttttctacagttagggttgagttacttcctatcaagccagtacgtgctaacaggctcaatattcctgaatgaaatatcagactagtgacaagctcctggtcttgagatgtcttctcgttaaggagatgggccttttggaggtaaaggataaaatgaatgagttctgtcatgattcactattctagaacttgcatgacctttactgtgttagctctttgaatgttcttgaaattttagactttctttgtaaacaaatgatatgtccttatcattgtataaaagctgttatgtgcaacagtgtggagattccttgtctgatttaataaaatacttaaacactgaaaaaaaaaaaaaaaaaaaaaaaaaaaaaaaaaaaaaaaaaaaaaaaaaaaaaaaaaaaaaaaaaaaaaaaaaaaaaaaaagtaccttctgaggcggaaagaaccagccggatctcgacttcgagcttatttatattccaaaaaaaaaaaataaaatttcaatttttaagctttcactaattccaaacccacccgctttttatagtaagtttttcacccataaataataaatacaataattaatttctcgtaaaagtagaaaatatattctaatttattgcacggtaaggaagtagatcataactcgagcatgggagatcccgtcgttttacaacgtcgtgactgggaaaaccctggcgttacccaacttaatcgccttgcagcacatccccctttcgccagctggcgtaatagcgaagaggcccgcaccgatcgcccttcccaacagttgcgcagcctgaatggcgaatggcgctttgcctggtttccggcaccagaagcggtgccggaaagctggctggagtgcgatcttcctgaggccgatactgtcgtcgtcccctcaaactggcagatgcacggttacgatgcgcccatctacaccaacgtgacctatcccattacggtcaatccgccgtttgttcccacggagaatccgacgggttgttactcgctcacatttaatgttgatgaaagctggctacaggaaggccagacgcgaattatttttgatggcgttaactcggcgtttcatctgtggtgcaacgggcgctgggtcggttacggccaggacagtcgtttgccgtctgaatttgacctgagcgcatttttacgcgccggagaaaaccgcctcgcggtgatggtgctgcgctggagtgacggcagttatctggaagatcaggatatgtggcggatgagcggcattttccgtgacgtctcgttgctgcataaaccgactacacaaatcagcgatttccatgttgccactcgctttaatgatgatttcagccgcgctgtactggaggctgaagttcagatgtgcggcgagttgcgtgactacctacgggtaacagtttctttatggcagggtgaaacgcaggtcgccagcggcaccgcgcctttcggcggtgaaattatcgatgagcgtggtggttatgccgatcgcgtcacactacgtctgaacgtcgaaaacccgaaactgtggagcgccgaaatcccgaatctctatcgtgcggtggttgaactgcacaccgccgacggcacgctgattgaagcagaagcctgcgatgtcggtttccgcgaggtgcggattgaaaatggtctgctgctgctgaacggcaagccgttgctgattcgaggcgttaaccgtcacgagcatcatcctctgcatggtcaggtcatggatgagcagacgatggtgcaggatatcctgctgatgaagcagaacaactttaacgccgtgcgctgttcgcattatccgaaccatccgctgtggtacacgctgtgcgaccgctacggcctgtatgtggtggatgaagccaatattgaaacccacggcatggtgccaatgaatcgtctgaccgatgatccgcgctggctaccggcgatgagcgaacgcgtaacgcgaatggtgcagcgcgatcgtaatcacccgagtgtgatcatctggtcgctggggaatgaatcaggccacggcgctaatcacgacgcgctgtatcgctggatcaaatctgtcgatccttcccgcccggtgcagtatgaaggcggcggagccgacaccacggccaccgatattatttgcccgatgtacgcgcgcgtggatgaagaccagcccttcccggctgtgccgaaatggtccatcaaaaaatggctttcgctacctggagagacgcgcccgctgatcctttgcgaatacgcccacgcgatgggtaacagtcttggcggtttcgctaaatactggcaggcgtttcgtcagtatccccgtttacagggcggcttcgtctgggactgggtggatcagtcgctgattaaatatgatgaaaacggcaacccgtggtcggcttacggcggtgattttggcgatacgccgaacgatcgccagttctgtatgaacggtctggtctttgccgaccgcacgccgcatccagcgctgacggaagcaaaacaccagcagcagtttttccagttccgtttatccgggcaaaccatcgaagtgaccagcgaatacctgttccgtcatagcgataacgagctcctgcactggatggtggcgctggatggtaagccgctggcaagcggtgaagtgcctctggatgtcgctccacaaggtaaacagttgattgaactgcctgaactaccgcagccggagagcgccgggcaactctggctcacagtacgcgtagtgcaaccgaacgcgaccgcatggtcagaagccgggcacatcagcgcctggcagcagtggcgtctggcggaaaacctcagtgtgacgctccccgccgcgtcccacgccatcccgcatctgaccaccagcgaaatggatttttgcatcgagctgggtaataagcgttggcaatttaaccgccagtcaggctttctttcacagatgtggattggcgataaaaaacaactgctgacgccgctgcgcgatcagttcacccgtgcaccgctggataacgacattggcgtaagtgaagcgacccgcattgaccctaacgcctgggtcgaacgctggaaggcggcgggccattaccaggccgaagcagcgttgttgcagtgcacggcagatacacttgctgatgcggtgctgattacgaccgctcacgcgtggcagcatcaggggaaaaccttatttatcagccggaaaacctaccggattgatggtagtggtcaaatggcgattaccgttgatgttgaagtggcgagcgatacaccgcatccggcgcggattggcctgaactgccagctggcgcaggtagcagagcgggtaaactggctcggattagggccgcaagaaaactatcccgaccgccttactgccgcctgttttgaccgctgggatctgccattgtcagacatgtataccccgtacgtcttcccgagcgaaaacggtctgcgctgcgggacgcgcgaattgaattatggcccacaccagtggcgcggcgacttccagttcaacatcagccgctacagtcaacagcaactgatggaaaccagccatcgccatctgctgcacgcggaagaaggcacatggctgaatatcgacggtttccatatggggattggtggcgacgactcctggagcccgtcagtatcggcggaattccagctgagcgccggtcgctaccattaccagttggtctggtgtcaaaaataataataaccgggcaggggggatccaattctgtgagcgtatggcaaacgaaggaaaaatagttatagtagccgcactcgatgggacatttcaacgtaaaccgtttaataatattttgaatcttattccattatctgaaatggtggtaaaactaactgctgtgtgtatgaaatgctttaaggaggcttccttttctaaacgattgggtgaggaaaccgagatagaaataataggaggtaatgatatgtatcaatcggtgtgtagaaagtgttacatcgactcataatattatattttttatctaaaaaactaaaaataaacattgattaaattttaatataatacttaaaaatggatgttgtgtcgttagataaaccgtttatgtattttgaggaaattgataatgagttagattacgaaccagaaagtgcaaatgaggtcgcaaaaaaactgccgtatcaaggacagttaaaactattactaggagaattattttttcttagtaagttacagcgacacggtatattagatggtgccaccgtagtgtatataggatctgctcccggtacacatatacgttatttgagagatcatttctataatttaggagtgatcatcaaatggatgctaattgacggccgccatcatgatcctattttaaatggattgcgtgatgtgactctagtgactcggttcgttgatgaggaatatctacgatccatcaaaaaacaactgcatccttctaagattattttaatttctgatgtgagatccaaacgaggaggaaatgaacctagtacggcggatttactaagtaattacgctctacaaaatgtcatgattagtattttaaaccccgtggcgtctagtcttaaatggagatgcccgtttccagatcaatggatcaaggacttttatatcccacacggtaataaaatgttacaaccttttgctccttcatattcagctgaaatgagattattaagtatttataccggtgagaacatgagactgactcgagttaccaaattagacgctgtaaattatgaaaaaaagatgtactaccttaataagatcgtccgtaacaaagtagttgttaactttgattatcctaatcaggaatatgactattttcacatgtactttatgctgaggaccgtgtactgcaataaaacatttcctactactaaagcaaaggtactatttctacaacaatctatatttcgtttcttaaatattccaacaacatcaactgaaaaagttagtcatgaaccaatacaacgtaaaatatctagcaaaaattctatgtctaaaaacagaaatagcaagagatccgtacgcggtaataaatagaaacgtactactgagatatactaccgatatagagtataatgatttagttactttaataaccgttagacataaaattgattctatgaaaactgtgtttcaggtatttaacgaatcatccataaattatactccggttgatgatgattatggagaaccaatcattataacatcgtatcttcaaaaaggtcataacaagtttcctgtaaattttctatacatagatgtggtaatatctgacttatttcctagctttgttagactagatactacagaaactaatatagttaatagtgtactacaaacaggcgatggtaaaaagactcttcgtcttcccaaaatgttagagacggaaatagttgtcaagattctctatcgccctaatataccattaaaaattgttagatttttccgcaataacatggtaactggagtagagatagccgatagatctgttatttcagtcgctgattaatcaattagtagagatgagataagaacattataataatcaataatatatcttatatcttatatcttatatcttatatcttgtttagaaaaatgctaatattaaaatagctaacgctagtaatccaatcggaagccatttgatatctataatagggtatctaatttcctgatttaaatagcggacagctatattctcggtagctactcgtttggaatcacaaacattatttacatctaatttactatctgtaatggaaacgtttcccaatgaaatggtacaatccgatacattgcattttgttatatttttttttaaagaggctggtaacaacgcatcgcttcgtttacatggctcgtaccaacaataatagggtaatcttgtatctattcctatccgtactatgcttttatcaggataaatacatttacatcgtatatcgtctttgttagcatcacagaatgcataaatttgttcgtccgtcatgataaaaatttaaagtgtaaatataactattatttttatagttgtaataaaaagggaaatttgattgtatactttcggttctttaaaagaaactgacttgataaaaatggctgtaatctctaaggttacgtatagtctatatgatcaaaaagagattaatgctacagatattatcattagtcatgttaaaaatgacgacgatatcggtaccgttaaagatggtagactaggtgctatggatggggcattatgtaagacttgtgggaaaacggaattggaatgtttcggtcactggggtaaagtaagtatttataaaactcatatagttaagcctgaatttatttcagaaattattcgtttactgaatcatatatgtattcactgcggattattgcgttcacgagaaccgtattccgacgatattaacctaaaagagttatcgggacacgctcttaggagattaaaggataaaatattatccaagaaaaagtcatgttggaacagtgaatgtatgcaaccgtatcaaaaaattactttttcaaagaaaaaggtttgtttcgtcaacaagttggatgatattaacgttcctaattctctcatctatcaaaagttaatttctattcatgaaaagttttggccattattagaaattcatcaatatccagctaacttattttatacagactactttcccatccctccgttgattattagaccggctattagtttttggatagatagtatacccaaagagaccaatgaattaacttacttattaggtatgatcgttaagaattgtaacttgaatgctgatgaacaggttatccagaaggcggtaatagaatacgatgatattaaaattatttctaataacactaccagtatcaatttatcatatattacatccggcaaaaataatatgattagaagttatatcgtcgcccgacgaaaagatcagaccgctagatctgtaattggtcccagtacatctatcaccgttaatgaggtaggaatgcccgcatatattagaaatacacttacagaaaagatatttgttaatgcctttacagtggataaagttaaacaactattagcgtcaaaccaagttaaattttactttaataaacgattaaaccaattaacaagaatacgccaaggaaagtttattaaaaataaaatacatttattgcctggtgattgggtagaagtagctgttcaagaatatacaagtattatttttggaagacagccgtctctacatagatacaacgtcatcgcttcatctatcagagctaccgaaggagatactatcaaaatatctcccggaattgccaactctcaaaatgctgatttcgacggggatgaggaatggatgatattagaacaaaatcctaaagctgtaattgaacaaagtattcttatgtatccgacgacgttactcaaacacgatattcatggagcccccgtttatggatctattcaagatgaaatcgtagcagcgtattcattgtttaggatacaagatctttgtttagatgaagtattgaacatcttggggaaatatggaagagagttcgatcctaaaggtaaatgtaaattcagcggtaaagatatctatacttacttgataggtgaaaagattaattatccgggtctcttaaaggatggtgaaattattgcaaacgacgtagatagtaattttgttgtggctatgaggcatctgtcattggctggactcttatccgatcataagtcgaacgtggaaggtatcaactttattatcaagtcatcttatgtttttaagagatatctatctatttacggttttggggtgacattcaaagatctgagaccaaattcgacgttcactaataaattggaggccatcaacgtagaaaaaatagaacttatcaaagaagcatacgccaaatatctcaacgatgtaagagacgggaaaatagttccattatctaaagctttagaggcggactatgtggaatccatgttatccaacttgacaaatcttaatatccgagagatagaagaacatatgagacaaacgctgatagatgatccagataataacctcctgaaaatggccaaagcgggttataaagtaaatcccacagaactaatgtatattctaggtacgtatggacaacaaaggattgatggtgaaccagcagagactcgagtattgggtagagttttaccttactatcttccagactctaaggatccagaaggaagaggttacattcttaattctttaacaaaaggattaacgggttctcaatattacttttcgatgctggttgccagatctcaatctactgatatcgtctgtgaaacatcacgtaccggaacactggctagaaaaatcattaaaaagatggaggatatggtggtcgacggatacggacaagtagttataggtaatacgctcatcaagtacgccgccaattataccaaaattctaggctcagtatgtaaacctgtagatcttatctatccagatgagtccatgacttggtatttggaaattagtgctctgtggaataaaataaaacagggattcgtttactctcagaaacagaaacttgcaaagaagacattggcgccgtttaatttcctagtattcgtcaaacccaccactgaggataatgctattaaggttaaggatctgtacgatatgattcataacgtcattgatgatgtgagagagaaatacttctttacggtatctaatatagattttatggagtatatattcttgacgcatcttaatccttctagaattagaattacaaaagaaacggctatcactatctttgaaaagttctatgaaaaactcaattatactctaggtggtggaactcctattggaattatttctgcacaggtattgtctgagaagtttacacaacaagccctgtccagttttcacactactgaaaaaagtggtgccgtcaaacaaaaacttggtttcaacgagtttaataacttgactaatttgagtaagaataagaccgaaattatcactctggtatccgatgatatctctaaacttcaatctgttaagattaatttcgaatttgtatgtttgggagaattaaatccaaacatcactcttcgaaaagaaacagataaatatgtagtagatataatagtcaatagattatacatcaagagagcagaaataaccgaattagtcgtcgaatatatgattgaacgatttatctcctttagcgtcattgtaaaggaatggggtatggagacattcattgaggacgaggataatattagatttactgtctacctaaatttcgttgaaccggaagaattgaatcttagtaagtttatgatggttcttccgggggcagccaacaagggaaagattagtaaattcaagattcctatctctgattatacgggatatgacgacttcaatcaaacaaaaaagctcaataagatgactgtagaactcatgaatctaaaagaattgggttctttcgatttggaaaacgtcaacgtgtatcctggagtatggaatacatacgatatcttcggtatcgaggccgctcgtgaatacttgtgcgaagccatgttaaacacctatggagaagggttcgattatctgtatcagccttgtgatcttctcgctagtttactatgtgctagttacgaaccagaatcagtgaataaattcaagttcggcgcagctagtactcttaagagagctacgttcggagacaataaagcattgttaaacgcggctcttcataaaaagtcagaacctattaacgataatagtagctgccacttttttagcaaggtccctaatataggaactggatattacaaatactttatcgacttgggtcttctcatgagaatggaaaggaaactatctgataagatatcttctcaaaagatcaaggaaatggaagaaacagaagacttttaattcttatcaataacatatttttctatgatctgtcttttaaacgatggattttccacaaatgcgcctctcaagtccctcatagaatgatacacgtataaaaaatatagcataggcaatgactccttatttttagacattagatatgccaaaatcatagccccgcttctatttactcccgcagcacaatgaaccaacacgggctcgtttcgttgatcacatttagataaaaaggcggttacgtcgtcaaaatatttactaatatcggtagttgtatcatctaccaacggtatatgaataatattaatattagagttaggtaatgtatatttatccatcgtcaaatttaaaacatatttgaacttaacttcagatgatggtgcatccatagcatttttataatttcccaaatacacattattggttacccttgtcattatagtgggagatttggctttgtgcatatctccagttgaacgtagtagtaagtatttatacaaacttttcttatccatttataacgtacaaatggataaaactactttatcggtaaacgcgtgtaatttagaatacgttagagaaaaggctatagtaggcgtacaagcagccaaaacatcaacacttatattctttgttattatattggcaattagtgcgctattactctggtttcagacgtctgataatccagtctttaatgaattaacgagatatatgcgaattaaaaatacggttaacgattggaaatcattaacggatagcaaaacaaaattagaaagtgatagaggtagacttctagccgctggtaaggatgatatatttgaattcaaatgtgtggatttcggcgcctattttatagctatgcgattggataagaaaacatatctgccgcaagctattaggcgaggtactggagacgcgtggatggttaaaaaggcggcaaaggtcgatccatctgctcaacaattttgtcagtatttgataaaacacaagtctaataatgttattacttgtggtaatgagatgttaaatgaattaggttatagcggttattttatgtcaccgcattggtgttccgattttagtaatatggaatagtgttagataaatgcggtaacgaatgttcctgtaaggaaccataacagcttagatttaacgttaaagatgagcataaacataataaacaaaattacaatcaaacttataacattaatatcaaacaatccaaaaaatgaaatcagtggagtagtaaacgcgtacataactcctggataacgtttagcagctgccgttcctattctagaccaaaaattcggtttcatgttttcgaaacggtattctgcaacaagtcgaggatcgtgttctacatatttggcggcattatccagtatctgcctattgatcttcatttcgttttcgattctggctatttcaaaataaaatcccgatgatagacctccagactttataatttcatctacgatgttcagcgccgtagtaactctaataatataggctgataagctaacatcataccctcctgtatatgtgaatatggcatgatttttgtccattacaagctcggttttaactttattgcctgtaataatttctctcatctgtaggatatctatttttttgtcatgcattgccttcaagacgggacgaagaaacgtaatatcctcaataacgttatcgttttctacaataactacatattctacctttttattttctaactcggtaaaaaaattagaatcccatagggctaaatgtctagcgatatttcttttcgtttcctctgtacacatagtgttacaaaaccctgaaaagaagtgagtatacttgtcatcatttctaatgtttcctccagtccactgtataaacgcataatccttgtaatgatctggatcatccttgactaccacaacatttcttttttctggcataacttcgttgtcctttacatcatcgaacttctgatcattaatatgctcatgaacattaggaaatgtttctgatggaggtctatcaataactggcacaacaataacaggagttttcaccgccgccatttagttattgaaattaatcatatacaactctttaatacgagttatattttcgtctatccattgtttcacattgacatatttcgacaaaaagatataaaatgcgtattccaatgcttctctgtttaatgaattactaaaatatacaaacacgtcactgtctggcaataaatgatatcttagaatattgtaacaatttattttgtattgcacatgttcgtgatctatgagttcttcttcgaatggcataggatctccgaatctgaaaacgtataaataggagttagaataataatatttgagagtattggtaatatataaactctttagcggtataattagtttttttctctcaatttctatttttagatgtgatggaaaaatgactaattttgtagcattagtatcatgaactctaatcaaaatcttaatatcttcgtcacacgttagctctttgaagtttttaagagatgcatcagttggttctacagatggagtaggtgcaacaattttttgttctacacatgtatgtactggagccattgttttaactataatggtgcttgtatcgaaaaactttaatgcagatagcggaagctcttcgccgcgactttctacgtcgtaattgggttctaacgccgatctctgaatggatactagttttctaagttctaatgtgattctctgaaaatgtaaatccaattcctccggcattatagatgtgtatacatcggtaaataaaactatagtatccaacgatcccttctcgcaaattctagtcttaaccaaaaaatcgtatataaccacggagatggcgtatttaagagtggattcttctaccgttttgttcttggatgtcatataggaaactataaagtccgcactactgttaagaatgattactaacgcaactatatagtttaaattaagcattttggaaacataaaataactctgtagacgatacttgactttcgaataagtttgcagacaaacgaagaaagaacagacctctcttaatttcagaagaaaactttttttcgtattcctgacgtctagagtttatatcaataagaaagttaagaattagtcggttaatgttgtatttcattacccaagtttgagatttcataatattatcaaaagacatgataatattaaagataaagcgctgactatgaacgaaatagctatatggttcgctcaagaatatagtcttgttaaacgtggaaacgataactgtatttttaatcacgtcagcggcatctaaattaaatataggtatatttattccacacactctacaatatgccacaccatcttcataataaataaattcgttagcaaaattattaattttagtgaaatagttagcgtcaactttcatagcttccttcaatctaatttgatgctcacacggtgcgaattccactctaacatcccttttccatgcctcaggttcatcgatctctataatatctagttttttgcgtttcacaaacacaggctcgtctctcgcgatgagatctgtatagtaactatgtaaatgataactagatagaaagatgtagctatatagatgacgatcctttaagagaggtataataactttaccccaatcagatagactgttgttatggtcttcggaaaaagaatttttataaatttttccagtattttccaaatatacgtacttaacatctaaaaaatccttaatgataataggaatggataatccgtctattttataaagaaatacatatcgcacattatacttttttttggaaatgggaataccgatgtgtctacataaatatgcaaagtctaaatattttttagagaatcttagttggtccaaattcttttccaagtacggtaatagatttttcatattgaacggtatcttcttaatctctggttctagttccgcattaaatgatgaaactaagtcactatttttataactaacgattacatcacctctaacatcatcatttaccagaatactgatcttcttttgtcgtaaatacatgtctaatgtgttaaaaaaaagatcatacaagttatacgtcatttcatctgtggtattcttgtcattgaaggataaactcgtactaatctcttctttaacagcctgttcaaatttatatcctatatacgaaaaaatagcaaccagtgtttgatcatccgcgtcaatattctgttctatcgtagtgtataacaatcgtatatcttcttctgtgatagtcgatacgttataaaggttgataacgaaaatatttttatttcgtgaaataaagtcatcgtaggattttggacttatattcgcgtctagtagatatgcttttatttttggaatgatctcaattagaatagtctctttagagtccatttaaagttacaaacaactaggaaattggtttatgatgtataatttttttagtttttatagattctttattctatacttaaaaaatgaaaataaatacaaaggttcttgagggttgtgttaaattgaaagcgagaaataatcataaattatttcattatcgcgatatccgttaagtttgtatcgtaatggcgtggtcaattacgaataaagcggatactagtagcttcacaaagatggctgaaatcagagctcatctaaaaaatagcgctgaaaataaagataaaaacgaggatattttcccggaagatgtaataattccatctactaagcccaaaaccaaacgagccactactcctcgtaaaccagcggctactaaaagatcaaccaaaaaggaggaagtggaagaagaagtagttatagaggaatatcatcaaacaactgaaaaaaattctccatctcctggagtcagcgacattgtagaaagcgtggccgctgtagagctcgatgatagcgacggggatgatgaacctatggtacaagttgaagctggtaaagtaaatcatagtgctagaagcgatctctctgacctaaaggtggctaccgacaatatcgttaaagatcttaagaaaattattactagaatctctgcagtatcgacggttctagaggatgttcaagcagctggtatctctagacaatttacttctatgactaaagctattacaacactatctgatctagtcaccgagggaaaatctaaagttgttcgtaaaaaagttaaaacttgtaagaagtaaatgcgtgcacttttttataaagatggtaaactctttaccgataataattttttaaatcctgtatcagacgataatccagcgtatgaggttttgcaacatgttaaaattcctactcatttaacagatgtagtagtatatgaacaaacgtgggaggaggcgttaactagattaatttttgtgggaagtgattcaaaaggacgtagacaatacttttacggaaaaatgcatgtacagaatcgcaacgctaaaagagatcgtatttttgttagagtatataacgttatgaaacgaattaattgttttataaacaaaaatataaagaaatcgtccacagattccaattatcagttggcggtttttatgttaatggaaactatgttttttattagatttggtaaaatgaaatatcttaaggagaatgaaacagtagggttattaacactaaaaaataaacacatagaaataagtcccgatgaaatagttatcaagtttgtaggaaaggacaaagtttcacatgaatttgttgttcataagtctaatagactatataaaccgctattgaaactgacggatgattctagtcccgaagaatttctgttcaacaaactaagtgaacgaaaggtatacgaatgtatcaaacagtttggtattagaatcaaggatctccgaacgtatggagtcaattatacgtttttatataatttttggacaaatgtaaagtccatatctcctcttccgtcaccaaaaaagttaatagcattaactatcaaacaaactgctgaagtggtaggtcatactccatcaatttcaaaaagagcttatatggcaacgactattttagaaatggtaaaggataaaaattttttagatgtagtatctaaaactacgttcgatgaattcctatctatagtcgtagatcacgttaaatcatctacggatggatgatatagatctttacacaaataattacaagaccgataaatggaaatggataagcgtatgaaatctctcgcaatgacagctttcttcggagagctaagcacattagatattatggcattgataatgtctatatttaaacgccatccaaacaataccattttttcagtggataaggatggtcagtttatgattgatttcgaatacgataattataaggcttctcaatatttggatctgaccctcactccgatatctggagatgaatgcaagactcacgcatcgagtatagccgaacaattggcgtgtgcggatattattaaagaggatattagcgaatatatcaaaactactccccgtcttaaacgatttataaaaaaataccgcaatagatcagatactcgtatcagtcgagatacagaaaagcttaaaatagctctagctaaaggcatagattacgaatatataaaagacgcttgttaataagtaaatgaaaaaaaactagtcgtttataataaaacacgatatggatgccaacgtagtatcattttctactattgcgacgtatatagacgctttagcgaagaatgcttcggaattagaacagaggtctaccgcatacgaaataaataatgaattggaactagtatttattaagccgccattgattactttgacaaatgtagtgaatatctctacgattcaggaatcgtttattcgatttaccgttactaataaggaaggtgttaaaattagaactaagattccattatctaaggtacatggtctagatgtaaaaaatgtacagttagtagatgctatagataacatagtttgggaaaagaaatcattagtgacggaaaatcgtcttcacaaagaatgcttgttgagactatcgacagaggaacgtcatatatttttggattacaagaaatatggatcctctatccgactagaattagtcaatcttattcaagcaaaaacaaaaaactttacgatagactttaagctaaaatattttctaggatccggtgcccagtctaaaagttctttgttgcacgctattaatcatccaaagtcaaggcctaatacatctctggaaatagaattcacacctagagacaatgaaacagttccatatgatgaactaataaaggaattgacgactctctcgcgtcatatatttatggcttctccagagaatgtaattctttctccgcctattaacgcgcctataaaaacctttatgttgcctaaacaagatatagtaggtttggatctggaaaatctatatgccgtaactaagactgacggcattcctataactatcagagttacatcaaacgggttgtattgttattttacacatcttggttatattattagatatcctgttaagagaataatagattccgaagtagtagtctttggtgaggcagttaaggataagaactggaccgtatatctcattaagctaatagagcctgtgaatgcaatcaatgatagactagaagaaagtaagtatgttgaatctaaactagtggatatttgtgatcggatagtattcaagtcaaagaaatacgaaggtccgtttactacaactagtgaagtcgtcgatatgttatctacatatttaccaaagcaaccagaaggtgttattctgttctattcaaagggacctaaatctaacattgattttaaaattaaaaaggaaaatactatagaccaaactgcaaatgtagtatttaggtacatgtccagtgaaccaattatctttggagaatcgtctatctttgtagagtataagaaatttagcaacgataaaggctttcctaaagaatatggttctggtaagattgtgttatataacggcgttaattatctaaataatatctattgtttggaatatattaatacacataatgaagtgggtattaagtccgtggttgtacctattaagtttatagcagaattcttagttaatggagaaatacttaaacctagaattgataaaaccatgaaatatattaactcagaagattattatggaaatcaacataatatcatagtcgaacatttaagagatcaaagcatcaaaataggagatatctttaacgaggataaactatcggatgtgggacatcaatacgccaataatgataaatttagattaaatccagaagttagttattttacgaataaacgaactagaggaccgttgggaattttatcaaactacgtcaagactcttcttatttctatgtattgttccaaaacatttttagacgattccaacaaacgaaaggtattggcgattgattttggaaacggtgctgacctggaaaaatacttttatggagagattgcgttattggtagcgacggatccggatgctgatgctatagctagaggaaatgaaagatacaacaaattaaactctggaattaaaaccaagtactacaaatttgactacattcaggaaactattcgatccgatacatttgtctctagtgtcagagaagtattctattttggaaagtttaatatcatcgactggcagtttgctatccattattcttttcatccgagacattatgctaccgtcatgaataacttatccgaactaactgcttctggaggcaaggtattaatcactaccatggacggagacaaattatcaaaattaacagataaaaagacttttataattcataagaatttacctagtagcgaaaactatatgtctgtagaaaaaatagctgatgatagaatagtggtatataatccatcaacaatgtctactccaatgactgaatacattatcaaaaagaacgatatagtcagagtgtttaacgaatacggatttgttcttgtagataacgttgatttcgctacaattatagaacgaagtaaaaagtttattaatggcgcatctacaatggaagatagaccgtctacaaaaaactttttcgaactaaatagaggagccattaaatgtgaaggtttagatgtcgaagacttacttagttactatgttgtttatgtcttttctaagcggtaaataataatatggtatgggttctgatctcccagttctaaatgcattaaataattccaatagagcgatttttgttcctataggaccttccaactgtggatactctgtattgttaatagatatattaatacttttgtcgggtaacagaggttctacgtcttctaaaaataaaagttttataacatctggcctgttcataaataaaaacttggcgattctatatatactcttattatcaaatctagccattgtcttatagatgtgagctactgtaggtgtaccatttgattttctttctaatactatatatttctctcgaagaagttcttgcacatcatctgggaataaaatactactgttgagtaaatcagttattttttttatatcgatattgatggacatttttatagttaaggataataagtatcccaaagtcgataacgacgataacgaagtatttatacttttaggaaatcacaatgactttatcagattaaaattaacaaaattaaaggagcatgtatttttttctgaatatattgtgactccagatacatatggatctttatgcgtcgaattaaatgggtctagttttcagcacggcggtagatatatagaggtggaggaatttatagatgctggaagacaagttagatggtgttctacatccaatcatatatctaaagatatacccgaagatatgcacactgataaatttgtcatttatgatatttatacgtttgattcgttcaagaataaacgattggtattcgtacaggtacctccgtcgttaggagatgatagtcatttgactaatccgttattgtcaccgtattatcgtaattcagtagccagacaaatggtcaatgatatgatttttaatcaagattcatttttaaaatatttattagaacatctgattagaagccactatagagtttctaaacatataacaatagttagatacaaggataccgaagaattaaatctaacgagaatatgttataatagagataagtttaaggcgtttgtattcgcttggtttaacggcgtttcggaaaatgaaaaggtactagatacgtataaaaaggtatctaatttgatataatgaattcagtgactgtatcacacgcgccatatactattacttatcacgatgattgggaaccagtaatgagtcaattggtagagttttataacgaagtagccagttggctgctacgagacgagacgtcgcctattcctgataagttctttatacagttgaaacaaccgcttagaaataaacgagtatgtgtgtgtggtatagatccgtatccgaaagatggaactggtgtaccgttcgaatcaccaaattttacaaaaaaatcaattaaggagatagcttcatctatatctagattaaccggagtaattgattataaaggttataaccttaatataatagacggggttataccctggaattattacttaagttgtaaattaggagaaacaaaaagtcacgcgatttactgggataagatttccaagttactgctgcagcatataactaaacacgttagtgttctttattgtttgggtaaaacagatttctcgaatatacgggccaagttagaatccccggtaactaccatagtcggatatcatccagcggctagagaccgccaattcgagaaagatagatcatttgaaattatcaacgttttactggaattagacaacaaggcacctataaattgggctcaagggtttatttattaatgctttagtgaaattttaacttgtgttctaaatggatgcggctattagaggtaatgatgttatctttgttcttaagactataggtgtcccgtcagcgtgcagacaaaatgaagatccaagatttgtagaagcatttaaatgcgacgagttagaaagatatattgagaataatccagaatgtacactattcgaaagtcttagggatgaggaagcatactctatagtcagaattttcatggatgtagatttagacgcgtgtctagacgaaatagattatttaacggccattcaagattttattatcgaggtgtcaaactgtgtagctagattcgcgtttacagaatgcggcgccattcatgaaaatgtaataaaatccatgagatctaatttttcattgactaagtctacaaatagagataaaacaagttttcatattatctttttagatacgtataccactatggatacattgatagctatgaaacgaacactattagaattaagtagatcatctgaaaatccactaaccagatcgatagacactgccgtatataggagaaaaacaactcttcgggttgtaggtactaggaaaaatccaaattgcgacactattcatgtaatgcaaccaccgcatgataatatagaagattacctattcacttacgtggatatgaacaacaatagttattacttttctctacaacaacgattggaggatttagttcctgataagttatgggaaccagggtttatttcattcgaagacgctataaaaagagtttcaaaaatattcattaattctataataaactttaatgatctcgatgaaaataattttacaacggtaccactggtcatagattacgtaacaccttgtgcattatgtaaaaaacgatcgcataaacatccgcatcaactatcgttggaaaatggtgctattagaatttacaaaactggtaatccacatagttgtaaagttaaaattgttccgttggatggtaataaactgtttaatattgcacaaagaattttagacactaactctgttttattaaccgaacgaggagaccatatagtttggattaataattcatggaaatttaacagcgaagaacccttgataacaaaactaattttgtcaataagacatcaactacctaaggaatattcaagcgaattactctgtccaagaaaacgaaagactgtagaagctaacatacgagacatgttagtagattcagtggagaccgatacctatccggataaacttccgtttaaaaatggtgtattggacctggtagacggaatgttttactctggagatgatgctaaaaaatatacgtgtactgtatcaaccggatttaaatttgacgatacaaagttcgtcgaagacagtccagaaatggaagagttaatgaatatcattaacgatatccaaccattaacggatgaaaataagaaaaatagagagctatatgaaaaaacattatctagttgtttatgcggtgctaccaaaggatgtttaacattcttttttggagaaactgcaactggaaagtcgacaaccaaacgtttgttaaagtctgctatcggtgacctgtttgttgagacgggtcaaacaattttaacagatgtattggataaaggacctaatccatttatcgctaacatgcatttgaaaagatctgtattctgtagcgaactacctgattttgcctgtagtggatcaaagaaaattagatctgacaatattaaaaagttgacagaaccttgtgtcattggaagaccgtgtttctccaataaaattaataatagaaaccatgcgacaatcattatcgatactaattacaaacctgtttttgataggatagataacgcattaatgagaagaattgccgtcgtgcgattcagaacacacttttctcaaccttctggtagagaggctgctgaaaataatgacgcgtacgataaagtcaaactattagacgaggggttagatggtaaaatacaaaataatatatatagatttgcatttctatacttgttggtgaaatggtacaaaaaatatcatgttcctattatgaaactatatcctacacccgaagagattcctgactttgcattctatctcaaaataggtactctgttggtatctagctctgtaaagcatattccattaatgacggacctctccaaaaagggatatatattgtacgataatgtggtcactcttccgttgactactttccaacagaaaatatccaagtattttaattctagactatttggacacgatatagagagcttcatcaatagacataagaaatttgccaatgttagtgatgaatatctgcaatatatattcatagaggatatttcatctccgtaaatatatgctcatatatttatagaagatatcacatatctaaatgaataccggaatcatagatttatttgataatcatgttgatagtataccaactatattacctcatcagttagctactctagattatctagttagaactatcatagatgagaacagaagcgtgttattgttccatattatgggatcaggtaaaacaataatcgctttgttgttcgccttggtagcttccagatttaaaaaggtttacattctagtgccgaacatcaacatcttaaaaattttcaattataatatgggtgtagctatgaacttgtttaatgacgaattcatagctgagaatatctttattcattccacaacaagtttttattctcttaattataacgataacgtcattaattataacggattatctcgctacaataactctatttttatcgttgatgaggcacataatatctttgggaataatactggagaacttatgaccgtgataaaaaataaaaacaagattccttttttactattgtctggatctcccattactaacacacctaatactctgggtcatattatagatttaatgtccgaagagacgatagattttggtgaaattattagtcgtggtaagaaagtaattcagacacttcttaacgaacgcggtgtgaatgtacttaaggatttgcttaaaggaagaatatcatattacgaaatgcctgataaagatctaccaacgataagatatcacggacgtaagtttctagatactagagtagtatattgtcacatgtctaaacttcaagagagagattatatgattactagacgacagctatgttatcatgaaatgtttgataaaaatatgtataacgtgtcaatggcagtattgggacaacttaatctgatgaataatttagatactttatttcaggaacaggataaggaattgtacccaaatctgaaaataaataatggcgtgttatacggagaagaattggtaacgttaaacattagttccaaatttaaatactttattaatcggatacagacactcaacggaaaacattttatatacttttctaattctacatatggcggattggtaattaaatatatcatgctcagtaatggatattctgaatataatggttctcagggaactaatccacatatgataaacggcaaaccaaaaacatttgctatcgttactagtaaaatgaaatcgtctttagaggatctattagatgtgtataattctcctgaaaacgatgatggtagtcaattgatgtttttgttttcatcaaacattatgtccgaatcctatactctaaaagaggtaaggcatatttggtttatgactatcccagatactttttctcaatacaaccaaattcttggacgatctattagaaaattctcttacgccgatatttctgaaccagttaatgtatatcttttagccgccgtatattccgatttcaatgacgaagtgacgtcattaaacgattacacacaggatgaattaattaatgttttaccatttgacatcaaaaagctgttgtatctaaaatttaagacgaaagaaacgaatagaatatactctattcttcaagagatgtctgaaacgtattctcttccaccacatccatcaattgtaaaagttttattgggagaattggtcagacaatttttttataataattctcgtattaagtataacgataccaagttacttaaaatggttacatcagttataaaaaataaagaagacgctaggaattacatagatgatattgtaaacggtcacttctttgtatcgaataaagtatttgataaatctcttttatacaaatacgaaaacgatattattacagtaccgtttagactttcctacgaaccatttgtttggggagttaactttcgtaaagaatataacgtggtatcttctccataaaactgatgagatatataaagaaataaatgtcgagctttgttaccaatggatacctttccgttacattggaaccacacgagctgacgttagacataaaaactaatattaggaatgccgtatataagacgtatctccatagagaaattagtggtaaaatggccaagaaaatagaaattcgtgaagacgtggaattacctctcggcgaaatagttaataattctgtagttataaacgttccgtgtgtaataacctacgcgtattatcacgttggggatatagtcagaggaacattaaacatcgaagatgaatcaaatgtaactattcaatgtggagatttaatctgtaaactaagtagagattcgggtactgtatcatttagcgattcaaagtactgcttttttcgaaatggtaatgcgtatgacaatggcagcgaagtcactgccgttctaatggaggctcaacaaggtatcgaatctagttttgtttttctcgcgaatatcgtcgactcataaaaaagagaatagcggtaagtataaacacgaatactatggcaataattgcgaatgttttattctcttcgatatatttttgataatatgaaaaacatgtctctctcaaatcggacaaccatctcataaaatagttctcgcgcgctggagaggtagttgccgctcgtataatctctccagaataatatacttgcgtgtcgtcgttcaatttatacggatttctatagttctctgttatataatgcggtttgccctcatgattagacgacgacaatagtgttctaaatttagatagttgatcagaatgaatgtttattggcgttggaaaaattatccatacagcgtctgcagagtggttgatagttgttcctagatatgtaaaataatccaacttactaggcagcaaattgtctagataaaatactgaatcaaacggtgcagacgtattggcggatctaatggaatccaattgattaactatcttttgaaaatatacatttttatgatccaatacttgtaagaatatagaaataatgataagtccatcatcgtgtttttttgcctcttcataagaactatattttttcttattccaatgaacaagattaatctctccagagtatttgtacacatctatcaagtgattggatccataatcgtcttcctttccccaatatatatgtagtgatgataacacatattcattggggagaaaccctccacttatatatcctcctttaaaattaatccttactagttttccagtgttctggatagtggttggtttcgactcattataatgtatgtctaacggcttcaatcgcgcgttagaaattgcttttttagtttctatattaataggagatagttgttgcggcatagtaaaaatgaaatgataactgtttaaaaatagctcttagtatgggaattacaatggatgaggaagtgatatttgaaactcctagagaattaatatctattaaacgaataaaagatattccaagatcaaaagacacgcatgtgtttgctgcgtgtataacaagtgacggatatccgttaataggagctagaagaacttcattcgcgttccaggcgatattatctcaacaaaattcagattctatctttagagtatccactaaactattacggtttatgtactacaatgaactaagagaaatctttagacggttgagaaaaggttctatcaacaatatcgatcctcactttgaagagttaatattattgggtggtaaactagataaaaaggaatctattaaagattgtttaagaagagaattaaaagaggaaagtgatgaacgtataacagtaaaagaatttggaaatgtaattctaaaacttacaacacgggataaattatttaataaagtatatataagttattgcatggcgtgttttattaatcaatcgttggaggatttatcgcatactagtatttacaatgtagaaattagaaagattaaatcattaaatgattgtattaacgacgataaatacgaatatctgtcttatatttataatatgctagttaatagtaaatgaacttttacagatctagtataattagtcagattattaagtataatagacgactagctaagtctattatttgcgaggatgactctcaaattattacactcacggcattcgttaaccaatgcctatggtgtcataaacgagtatccgtgtccgctattttattaactactgataacaaaatattagtatgtaacagacgagatagttttctctattctgaaataattagaactagaaacatgtttagaaagaaacgattatttctgaattattccaattatttgaacaaacaggaaagaagtatactatcgtcatttttttctctagatccagctactactgataatgatagaatagacgctatttatccgggtggcatacccaaaaggggtgagaatgttccagagtgtttatccagggaaattaaagaagaagttaatatagacaattcttttgtattcatagacactcggttttttattcatggcatcatagaagataccattattaataaattttttgaggtaatcttctttgtcggaagaatatctctaacgagtgatcaaatcattgatacatttaaaagtaatcatgaaatcaaggatctaatatttttagatccgaattcaggtaatggactccaatacgaaattgcaaaatatgctctagatactgcaaaacttaaatgttacggccatagaggatgttattatgaatcattaaaaaaattaactgaggatgattgattaaaaaatataaattaatttaccatcgtgtatttttataacgggattgtccggcatatcatgtagatagttaccgtctacatcgtatactcgaccatctacgcctttaaatcctctatttattgacattaatctattagaattggaataccaaatattagtaccctcaattagtttattggtaatattttttttagacgatagatcgatggctcttgaaaccaaggttttccaaccggactcattgtcgatcggtgagaagtctttttcattagcatgaatccattctaatgatgtatgtttaaacactctaaacaattggacaaattcttttgatttgctttgaatgatttcaaataggtcttcgtctacagtaggcataccattagataatctagccattataaagtgcacgtttacatatctacgttctggaggagtaagaacgtgactattgagacgaatggctcttcctactatctgacgaagagacgcctcgttccatgtcatatctaaaatgaagatatcattaattgagaaaaaactaataccctcgcctccactagaagagaatacgcatgttttaatgcattctccgttagtgtttgattcttggttaaactcagccaccgccttgattctagtatcttttgttctagatgagaactctatattagagataccaaagactttgaaatatagtaataagatttctattcctgactgattaacaaatggttcaaagactagacatttaccatgggatgctaatattcccaaacatacatctataaatttgacgcttttctcttttaattcagtaaatagagagatatcagccgcactagcatcccctttcaatagttctccctttttaaaggtatctaatgcggatttagaaaactctctatctcttaatgaatttttaaaatcattatatagtgttgctatctcttgcgcgtattcgcccggatcacgattttgtctttcaggaaagctatcgaacgtaaacgtagtagccatacgtctcagaattctaaatgatgatatacctgtttttatttcagcgagtttagccttttgataaatttcttcttgctttttcgacatattaacgtatcgcattaatactgttttcttagcgaatgatgcagacccttctacgtcatcaaaaatagaaaactcgttattaactatatacgaacatagtcctcctagtttggagactaattctttttcatcgactagacgtttattctcaaatagcgattggtgttgtaaggatcctggtcgtagtaagttaaccaacatggtgaattcttgcacactattgacgataggtgtagccgataaacaaatcatcttatggttttttaacgcaatggtcttagataaaaaattatatactgaacgagtaggacggatcttaccatcttctttgattaatgatttagaaatgaagttatgacattcatcaataatgacgcatattctactcttggaattaatagttttgatattagtaaaaaatttatttctaaaattttgatcatcgtaattaataaaaatacaatccttcgttatctctggagcgtatctgagtatagtgttcatccaaggatcttctatcaaagcctttttcaccaataagataatagcccaattcgtataaatatccttaagatgtttgagaatatatacagtagtcattgttttaccgacacccgtttcatggaacaataaaagagaatgcatactgtctaatcctaagaaaactcttgctacaaaatgttgataatccttgaggcgtactacgtccgaccccatcatttcaacgggcatattagtagttctgcgtaaggcataatcgatataggccgcgtgtgatttactcatttatgagtgataagtaataactatgttttaaaaatcacagcagtagtttaactagtcttctctgatgtttgttttcgatactttttgaatcagaagtcatactagaataaagcaacgagtgaacgtaatagagagcttcgtatactctattcgaaaactctaagaacttattaatgaattccgtatccactggattgtttaaaatactaaattgaacactgttcacatccttccaagaagaagacttagtgacggacttaacatgagacataaataaatccaaattttttttacaaacatcactagccaccataatggcgctatctttcaaccagctatcgcttacgcattttagcagtctaacatttttaaagagactacaatatattctcatagtatcgattacacctctaccgaataaagttggaagtttaataatacaatatttttcgtttacaaaatcaaataatggtcgaaacacgtcgaaggttaacatcttataatcgctaatgtatagattgttttcagtgagatgattattagatttaatagcatctcgttcacgtttgaacagtttattgcgtgcgctgaggtcggcaactacggcgtccgctttagtactcctcccataatactttacgctattaatctttaaaatttcatagactttatctagatcgctttctggtaacatgatatcatgtgtaaaaagttttaacatgtcggtcggcattctatttagatcattaactctagaaatctgaagaaagtaattagctccgtattccagactaggtaatgggcttttacctagagacagattaagttctggcaatgtttcataaaatggaagaaggacatgcgttccctcccggatattttttacaatttcatccatttacaactctatagtttgttttcattattattagttattatctcccataatcttggtaatacttaccccttgatcgtaagataccttatacaggtcattacatacaactaccaattgtttttgtacataatagattggatggttgacatccatggtggaataaactactcgaacagatagtttatctttccccctagatacattagccgtaatagttgtcggcctaaagaatatctttggtgtaaagttaaaagttagggttcttgttccattattgctttttgtcagtagttcattataaattctcgagatgggtccgttctctgaatatagaacatcatttccaaatctaacttctagtctagaaataatatcggtcttattcttaaaatctattcccttgatgaagggatcgttaatgaacaaatccttggcctttgattcggctgatctattatctccgttatagacgttacgttgactagtccaaagacttacaggaatagatgtatcgatgatgttgatactatgtgatatgtgagcaaagattgttctcttagtggcatcactatatgttccagtaatggcggaaaactttttagaaatgttatatataaaagaattttttcgtgttccaaacattagcagattagtatgaagataaacactcatattatcaggaacattatcaatttttacatacacatcagcatcttgaatagaaacgataccatcttctggaacctctacgatctcggcagactccggataaccagtcggtgggccatcgctaacaataactagatcatccaacaatctactcacatatgcatctatataatctttttcatcttgtgagtaccctggatacgaaataaatttattatccgtatttccataataaggtttagtataaacagagagagatgttgccgcatgaacttcagttacagtcgccgttggttggtttatttgacctattactctcctaggtttctctataaacgatggtttaatttgtacattcttaaccatatatccaataaagctcaattcaggaacataaacaaattctttgttgaacgtttcaaagtcgaacgaagagtcacgaataacgatatcggatactggattgaaggttaccgttacggtaatttttgaatcggatagtttaagactgctgaatgtatcttccacatcaaacggagttttaatataaacgtatactgtagatggttctttaatagtgtcattaggagttaggccaatagaaatatcattaagttcactagaatatccagagtgtttcaaagcaattgtattattgatacaattattatataattcttcgccctcaatttcccaaataacaccgttacacgaagagatagatacgtgattaatacatttatatccaacatatggtacgtaactgaatcttcccatacctttaacttctggaagttccaaactcagaaccaaatgattaagcgcagtaatatactgatccctaatttcgaagctagcgatagcctgattgtctggaccatcgtttgtcataactccggatagagaaatatattgcggcatatacaaagttggaatttgactatcgactgcgaagacattagaccgtttaatagagtcatccccaccgatcaaagaattaatgatagtattattcattttctatttaaaatggaaaaagcttacaataaactccgtagagaaatatctataatttgtgagttttccttaaagtaacagcttccgtaaacgccgtctttatctcttagtaggtttattgtatttatgaccttttccttatcttcatagaatactaaaggcaacaaagaaatttttggttcttctctaagagctacgtgagacttaaccatagaagccaacgaatccctacatattttagaacagaaataccctacttcaccacccttgtatgtctcaatactaataggtctaaaaaccaaatcttgattacaaaaccaacacttatcaattacactatttgtcttaatagacacatctgccatagatttataatactttggtagtatacaagcgagtgcttcttctttagcgggcttaaagactgctttaggtgctgaaataaccacatctggaaggcttactcgcttagccatttaattacggaactatttttttatacttctaatgagcaagtagaaaacctctcatctacaaaaacgtactcgtgtccataatcctctaccatagttacacgttttttagatctcatatgtgctaaaaagttttcccatactaattggttactattatttttcgtataatttttaacagtttgaggttttagatttttagttacagaagtgatatcgaatattttatccaaaaagaatgaataattaattgtcttagaaggagtgttttcttggcaaaagaataccaagtgcttaaatatttctactacttcattaatcttttctgtactcagattcagtttctcatcttttacttgattgattatttcaaagactaacttataatcctttttatttattctctcgttagccttaagaaaactagatacaaaatttgcatctacatcatccgtggatatttgatttttttccatgatatccaagagttccgagataatttctccagaacattgatgagacaataatctccgcaatacatttctcaaatgaataagtttattagacacgtggaagtttgactttttttgtacctttgtacatttttgaaataccgactcgcaaaaaatacaatattcatatccttgttcagatactataccgttatgtctacaaccgctacataatcgtagattcatgttaacactctacgtatctcgtcgtccaatattttatataaaaacattttatttctagacgttgccagaaaatcctgtaatatttttagttttttgggctgtgaataaagtatcgccctaatattgttaccgtcttccgccaatatagtagttaaattatccgcacatgcagaagaacaccgcttaggcggattcagtacaatgttatatttttcgtaccaactcatttaaatatcataatctaaaatagttctgtaatatgtctagcgctaatatattgatcataatcctgtgcataaattaagatacaacaatgtctcgaaatcatcgacatggcttcttccatagttagaagatcgtcgtcaaagttagcaacgtgattcatcaacatttgctgttttgaggcagcaaatactgaaccgtcgccattcaaccattcataaaaaccatcgtctgaatccattgataatttcttgtactggtttttgagagctcgcatcaatctagcatttctagctcccggattgaaaacagaaagaggatcgtacatccagggtccattttctgtaaatagaatcgtataatgtcccttcaagaagatatcagacgatccacaatcaaagaattggtctccgagtttgtaacaaactgcggactttaacctatacatgataccgtttagcataatttctggtgatacgtcaatcggagtatcatctattagagatctaaagccggtgtaacattctccaccaaacatattcttattctgacgtcgttctacataaaacatcattgctccattaacgataacaggggaatgaacagcactacccatcacattagttcccaatggatcaatgtgtgtaactccagaacatcttccatagcctatgttaggaggagcgaacaccactcttccactattgccatcgaatgccatagaataaatatccttggaattgatagaaatcggactgtcggatgttgtgatcatcttcataggattaacaactatgtatggtgccgcctgaagtttcatatcgtaactgatgccgtttataggtctagccacagaaaccaacgtaggtctaaatccaactatagacaaaatagaagccaatatctgttcctcatctgtcataacttgagagcatccagtatgaataatcttcattagatggggatctaccgcatcatcatcgttacaataaaaaattcccattctaatgttcataattgcttttctaatcatggtatgcatgtttgctctctgaatctctgtggaaattagatctgatacacctgtaatcactatcggattatcctccgtaagacgattaaccaacaacatataattataagactttacttttctaaattcataaagttgctggattaggctataggtgtctccatgtacatacgcgttctcgagcgcaggaagtttaataccgaatagtgccatcagaataggatgaatatagtaattagtttctggttttctataaataaaagacaaatcttgtgaactagacatatcggtaaaatgcatggattggaatcgtgtagtcgacagaagaatatgatgattagatggagagtatattttatctaactctttgagttggtcaccgattctaggactagctcgagaatgaataagtactaaaggatgagtacatttcacagaaacactagcattgttcaatgtgctctttacatgggtaaggagttgaaatagctcgtttctatttgttctgacaatatttagtttattcataatgttaagcatatcctgaatagtaaagttagatgtgtcatacttgttagtagttagatatttagcaattgcattcccatcatttctcaatctcgtactccaatcatgcgtggatgctacttcgtcgatggaaaccatacaatcctttttgataggctgttgagattgatcatttcctgcacgtttaggtttggtacgttgatttctagcccctgcggatataaagtcatcgtctacaatttgggacaatgaattgcatacactacaagacaaagatttatcagaagtgtgaatatgatcttcatctaccaaagaaagagtttgattagtataactagattttagtcctgcgttagatgttaaaaaaacatcgctattgaccacggcttccattatttatattcgtagtttttactcgaaagcgtgattttaatatccaatcttattacttttggaatcgttcaaaacctttgactagttgtagaatttgatctattgccctacgcgtatactcccttgcatcatatacgttcgtcaccagatcgtttgtttcggcctgaagttggtgcatatctctttcaacattcgacatgagatccttaagggccatatcgtctagattttgttgagatgctgctcctggatttggattttgttgtgctgttgtacatactgtaccaccagtaggtgtaggagtacatacagtggccacaataggaggttgagaaagtgtaaccgttggagtagtacaagaaatacttccatccgattgttgtgtacatgtagttgttggtaacgtctgagaaggttgggtagatggcggcgtcgtcgttttttgatctttattaaatttagagataatatcctgaacagcattgctcggcgtcaacgctggaaggagtgaactcgccggcgcatcagtatcttcagacagccaatcaaaaagattagacatatcagatgatgtattagtttgttgtcgtggttttggtgtaggagcagtactactaggtagaagaataggagccgatgtagctgttggaaccggctgtggagttatatgaatagttggttgtagcggttggataggctgtctgctggcggccatcatattatctctagctagttgttctcgcaactgtctttgataatacgactcttgagactttagtcctatttcaatcgcttcatcctttttcgtatccggatccttttcttcagaataatagattgacgactttggtgtagaggattctgccagcctctgtgagaacttgttaaagaagtccatttaaggctttaaaattgaattgcgattataagattaaatggcagacacagacgatattatcgactatgaatccgatgatctcaccgaatacgaggatgatgaagaagaggaagaagatggagagtcactagaaactagtgatatagatcccaaatcttcttataagattgtagaatcagcatccactcatatagaagatgcgcattccaatcttaaacatatagggaatcatatatctgctcttaaacgacgctatactagacgtataagtctatttgaaatagcgggtataatagcagaaagctataacttgcttcaacgaggaagattacctctagtttcagaattttctgacgaaacgatgaagcaaaatatgctacatgtaattatacaagagatagaggagggttcttgtcctatagtcatcgaaaagaacggagaattgttgtcggtaaacgattttgacaaagatggtctaaaattccatctagactatattatcaaaatttggaaacttcaaaaacgatattagaatttatacgaatatcgttctctaaatgtcacaatcaagtctcgcatgttcagcaatttattgtcgtactttatatcgtgttcattaacgatatcttgcaaaatagtaatgattctatcttccttcgatagatattcttcagagattattgtcttatattctttcttgttatcagatatgaatttgataagactttgaacattattgatacccgtctgtttaattttttctacagatattttagttttggcagattctatcgtatctgtcaatagacatccaacatcgacattcgacgtcaattgtctataaatcaacgtataaattttagaaataacattagcgaattgttgtgcgttgatgtcgttattctgaaacagtatgattttaggtagcattttcttaacaaagagaacgtatttattgttactcagttgaacagatgatatatccagattactaacgcatctgattccgtataccaaactttcagaagaaatggtatacaattgtttgtattcattcaatgtctctttttcagaaattagtttagagtcgaatactgcaataattttcaagagatagttttcatcagataagattttatttagtgtagatatgataaaactattgttttgttggagaacttgatacgccgcgttctctgtagtcgacgctctcaaatgggaaacaatctccattatttttttggaatcggatactatatcttcggtatcttgacgcagtctagtatacatagagttaagagagattagagtttgtacattaagcaacatgtctctaaatgtggctacaaacttttcctttttcacatcatctagtttattatataccgatttcacaacggcaccagatttaaggaaccagaatgaaaaactctgataactacaatatttcatcatagttacgattttatcatcttctatagttggtgtaatagcgcatacctttttctccaagactggaaccaacgtcataaaaatgtttaaatcaaaatccatatcaacatctgatgcgctaagaccagtctcgcgttcaagattatctttactaatggtgacgaactcatcgtataaaactctaagtttgtccattatttatttacagatttagttgtttaatttatttgtgctcttccagagttgggatagtatttttctaacgtcggtattatattattaggatctacgttcatatgtatcataatattaatcatccacgttttgataaatctatctttagcttctgaaataacgtatttaaacaaaggagaaaaatatttagctacggcatcagacgcaataacattttttgtaaatgtaacgtatttagacgacagatcttcgttaaaaagttttccatctatgtagaatccatcggttgttaacaccattcccgcgtcagattgaataggagtttgaatagtttgttttggaaatagatccttcaataacttatagttgggtgggaaaaaatcgattttatcactagactctttcttttttactatcattacctcatgaactatttcttgaatgagtatatgtattttctttcctatatcggacgcgttcattggaaaatataccatgtcgttaactataagaatatttttatcctcgtttacaaactgaataatatcagatgtagttcgtaaacgaactatatcatcaccagcacaacatctaactatatgatatccactagtttcctttagccgtttattatcttgttccatattagcagtcattccatcatttaagaaggcgtcaaaaataatagggagaaatgacattttggattctgttacaactttaccaaaattaaggatatacggacttactatctttttctcaacgtcaatttgatgaacacacgatgaaaatgtgcttctatgagattgatcatgtagaaaacaacaagggatacaatatttccgcatatcatgaaatatattaagaaatcccaccttattatatttccccaaaggatccatgcacgtaaacattatgccgttatcattaataaagacttctttctcatcggatctgtaaaagttgttactgatttttttcattccaggatctagataattaataatgatgggttttctattcttattctttgtattttggcatatcctagaccagtaaacagtttccactttggtaaaatcagcagacttttgaacgctattaaacatggcattaatggcaataactaaaaatgtaaaatatttttctatgttaggaatatggtttttcactttaatagatatatggtttttggccaaaatgatagatatttttttatccgaggatagtaaaatattattagtcgccgtctctataaaaatgaagctagtctcgatatccaattttattctagaattgataggagtcgccaaatgtaccttatacgttatatctcccttgatgcgttccatttgtgtatctatatcggacacaagatctgtaaatagttttacgttattaatcatcacggtatcgccgtcgctagataacgctaatgtaccatccaagtcccaaatggagagatttaactgttcatcgtttagaataaaatgattaccggtcatattaataaagtgttcatcgtatctagataacaacgacttataattaatgtccaagtcttgaactcgctgaatgatcttttttaacccagttagttttagattggtacgaaatatattgttaaactttgattctacagtaatgtccaaatctagttgtggaaatacttccatcaacattgtttcaaacttgataatattattatctacatcttcgtacgatccaaattccggaatagatgtatcgcacgctctggccacccagataaccaaaaagtcacacgctccaggatatacattgtataaaaagctatcgttttttagtagggtttttttctgcgtgtatacgaagggattaaaaatagtattatcaacgtaactatattccaaattattcttatgagaatagataataatatcgtccttaatatctaacaaatttcctaaatatccctttaattgagtcattcgaagcgtcaatagaatatgtctcttaactatttccggctgttgtatatttaaatgacttcgtaaaaaataatatatgggcgacttctcatctatgtaatcatatggagtgagatatagggctcgttctacctcctgccccttacccacctgtaataccaattgcggacttactatatatcgcatatttatatcgtggggtaaagtgaaaatctactaccgatgatgtaagtcttacaatgttcgaaccagtaccagatcttaatttggaggcctccgtagaactaggggaggtaaatatagatcaaacaacacctatgataaaggagaatagcggttttatatcccgcagtagacgtctattcgcccatagatctaaggatgatgagagaaaactagcactacgattctttttacaaagactttattttttagatcatagagagattcattatttgttcagatgcgttgacgctgtaaaagacgtcactattaccaaaaaaaataacattatcgtggcgccttatatagcacttttaactatcgcatcaaaaggatgcaaacttacagaaacaatgattgaagcattctttccagaactatataatgaacatagtaagaaatttaaattcaactctcaagtatccatcatccaagaaaaactcggataccagtttggaaactatcacgtttatgattttgaaccgtattactctacagtagctctggctattcgagatgaacattcatctggcatttttaatatccgtcaagagagttatctggtaagttcattatctgaaataacatatagattttatctaattaatctaaaatctgatcttgttcaatggagtgctagtacgggcgctgtaattaatcaaatggtaaatactgtattgattacagtgtatgaaaagttacaactggtcatagaaaatgattcacaatttacatgttcattggctgtggaatcaaaacttccaataaaattacttaaagatagaaatgaattatttacaaaattcattaacgagttaaaaaagaccagttcattcaagataagcaaacgcgataaggatacgctactaaaatattttacttaggactggagttagaatttatagacgactcatttcgtttatcattgttactattattactattactatcattattagtgttggcattattagtattcttcttgtcatcttgttcagaaatatacagcaatgctatacctaatactaaatacattatcatgctcgcaatggctctaacaacaacgaaccaaaatgaatttggtcgtagcttttgttcacaaaaatacataaagaaatgtctacataaatctatggcgccattggctacttgaaatagcgccagtcctcctacagattttaatatagctgtataacatgacatttattcatcatcaaaagagacagagtcaccatctgtcatatttagattttttttcatgtgttcaaagtatcctctactcatttcattataatagtttatcatacttagaattttaggacggatcaatgagtaagacttgactagatcgtcagtagtaatttgtgcatcgtctattctgcatccgcttcgtcgaataatgtatagcatcgctttgagattctccatagctatcaagtctttatacaatgacatggaaatatctgtgaatactttatacttctccaacatcgatgccttaacatcatcgcctactttagcattgaaaatacgttctattgtgtagatggatgtagcaagatttttaaacaacaatgccatcttacacgatgattgcctcaagtctccaatcgtttgtttagaacgattagctacagagtccaatgcttggctgactagcatattattatctttagaaattgtattcttcaatgaggcgtttatcatatctgtgatttcgttagtcatattacagtctgactgggttgtaatgttatccaacatatcacctatggatacggtacacgtaccagcatttgtaataatcctatctaagatgttgtatggcattgcgcagaaaatatcttctcctgtaatatctccactctcgataaatctactcagattattcttaaatgccttattctctggagaaaagatatcagtgtccatcatttcattaatagtatacgcagaaaagataccacgagtatcaattctatccaagatacttatcggttccgagtcacagataatggtttcctctccttcgggagatcctgcatagaaatatctaggacaatagtttctatactgtctgtaactctgataatctctaaagtcactaactgataccatgaaattgagaagatcaaacgctgaagtaattaatttttctgcctcgtttttactacaactagttttcatcaatgtagtgacgatgtattgtttagttacttttggtctaatactgatgatagagatattattgcttcccataatggatcttctagtagtcaccttaaagcccattgatgcgaatagcagatagataaagtcttggtatgactcctttctaatatagtacggactacctttgtcacccaactttatacccacataagccataacaacctctttaatagccgtttcatgaggtttatcagccatgagcctgagtagttggaagaatctcatgaatcccgtctcagaaagtcctatatgcatgatagatttatctttcctgggaaactctcgtatagtcatagatgaaatactctttaaagtttctgaaataagattagtaacagtcttacctccgactactctaggtaacaaacaaactctaataggtgttttctctgcggagataatatcagaaaggatagagcaataagtagtattattgtgattataaagaccgaatacataacaggtagaatttataaacatcatgtcctgaaggtttttagacttgtattcctcgtaatccataccgtcccaaaacatggatttggtaactttgatagccgtagatctttgttccttcgccaacaggttaaagaaattaataaagaatttgttgtttctatttatgtccacaaattgcacgtttggaagcgccacggttacattcactgcagcattttgaggatcgcgagtatgaagtacgatgttattgtttactggtatatctggaaagaaatctaccagtctaggaataagagattgatatcgcatagaaatagtaaagtttataatctcatcatcgaagagcattttgttaccattgtaataaatatccactctgtcatatgtataaatgaagtactgttcaaacatgatgagatgtttatatgttggcatagtagtgagatcgacgtttggtaatggcaatgtattaagattaactccataatgtctagcagcatctgcgatgttataagcgtcgtcaaagcggggtcgatcttgtattgttatatattgtctaacacctataagattatcaaaatcttgtctgcttaatacaccgttaacaatttttgccttgaattcttttattggtgcattaataacatccttatagaggatgttaaacaaataagtgttatcaaagttaagatctggatatttcttttctgctagaacatccattgagtcggagccatctggtttaatataaccaccgataaatctagctctgtattctgtatccgtcaatctaatattaagaaggtgttgagtgaaaggtggaagatcgtaaaagctgtgagtattaatgataggattagtttccgaactaatgttaattggggtattaataatatctatatttccagcgttaagtgtaacattaaacagttttaattcacgtgacgtggtatcaattaaataattaatgcccaatttggatatagcagcctgaagctcatcttgtttagttacggatcctaatgagttattaagcaatatatcgaacggatgaacgaaggttgttttaagttggtcacatactttgtaatctagacatagatgcggaagaacggtagaaactatacgaaataaatattcagagtcctctaattgatcaagagtaactattgacttaataggcatcatttatttagtattaaatgacgaccgtaccagtgacggatatacaaaacgatttaattacagagttttcagaagataattatccatctaacaaaaattatgaaataactcttcgtcaaatgtctattctaactcacgttaacaacgtggtagatagagaacataatgccgccgtagtgtcatctccagaggaaatatcctcacaacttaatgaagatctatttccagatgatgattcaccggccactattatcgaacgagtacaacctcatactactattattgacgatactccacctcctacgtttcgtagagagttattaatatcggaacaacgtcaacaacgagaaaaaagatttaatattacagtatcgaaaaatgctgaagcaataatggaatctagatctatgataacttctatgccaacacaaacaccatccttgggagtagtttatgataaagataaaagaattcagatgttagaggatgaagtggttaatcttagaaatcaacgatctaatacaaaatcatctgataatttagataattttaccaaaatactatttggtaagactccgtacaaatcaacagaagttaataagcgtatagccatcgttaattatgcaaatttgaacgggtcccccttatcagtcgaggacttggatgtttgttcggaggatgaaatagatagaatctataaaacgattaaacaatatcacgaaagtagaaaacgaaaaattatcgtcactaacgtgattattattgtcataaacattatcgagcaggcattgctaaaactcggatttgaagaaatcaaaggactgagtaccgatatcacttcagaaattatcgatgtggagatcggagatgactgcgatgctgtagcatctaaactaggaatcggtaacagtccggttcttaatattgtattgtttatactcaagatattcgttaaacgaattaaaattatttaatttaatacattcccatatccagacaacaatcgtctggattaatctgttcctgtcgtctcataccggacgacatattaatctttttattagtgggcatctttttagatggtttctttttcccagcattaactgagtcgatacctagaagatcgtgattgatctctccgaccattccacgaacttctaattggccgtctctgacggtaccataaactattttaccagcattagtaacagcttggacaatctgaccatccatcgcattgtacgatgtagtagtaactgttgttctacgtctaggagcaccagaagtatttttggagcccttggatgttgatgtagaagaagacgaggattttgattttggtttacatgtaatacattttgaactctttgattttgtatcacatgcgccggcagtcacatctgtttgagaattaagattattgttgcctcctttgacggctgcatctccaccgatttgcgctagtagatttttaagctgtggtgtaatcttattaactgtttcgatataatcatcgtaactgcttctaacggctaaattttttttatccgccatttagaagctaaaaatatttttatttatgcagaagatttaactagattatacaatgaactaatatgatccttttccagattatttacaaacttggtattttttggttctggaggaggcgaatttaaattcggacttggattcggattttgtaagttcttgatcttattatacatcgagtataggatggcgacagtaactgctacacaaataccgatcaaaagaagaataccaatcatttattgacaataacttcactattgatcaagtatgcaatatatcatcttttcactaaataagtagtaataatgattcaacaatgtcgagatatatggacgataataatttagttcatggaaatatcgctatgattggtgtgaatgactccgctaactctgtggggtgcgcagtgctttccccacatagaataaattagcattccgactgtgataataataccaagtataaacgccataatactcaatactttccatgtacgagtgggactggtagacttactaaagtcaataaaggcgaagatacacgaaagaatcaaaagaatgattccagcgattagcacgccggaaaaataatttccaatcataagcatcatgtccatttaactaataaaaattttaaatcgccgaatgaacaaagtggaatataaaccatataaaaacaatagtttgtactgcaaaaataatatctatttttgttttcgaagatatggtaaaattaaatagtagtacacagcatgttataactaacagcagcaacggctcgtaattacttatcatttactagacgaaaaggtggtgggatattttcttgctcaaataatacgaatatatcacccatccattttatgcgatgtttatatactctaatctttaatagatctatagacgacgggtttaccaacaatatagattttatcgattcatctaatttaaacccttccttaaacgtgaatgatctattatctggcataacgatgaccctacctgatgaatcggacaatgtactgggccatgtagaataaattatcaacgaattatcgtctacgaacatttatatcatttgttttaattttaggacgcgaataaatggatataaaatagaaaataacagatattacaaccagtgttatggccgcgcccaaccaggtaggcagttttattttatcttttactacaggttctcctggatgtacgtcaccaacggcggacgtagttctagtacaattagacgtaagttccgcttgggaattttttaacgctaaagagttaacgttaatcgtgcacccaacgtatttacatctagttcgttgaacatcttgattataatataaccattttctatctctagattcgtcagtgcactcatgtaaccaacataccctaggtcctaaatatttatctccggaattagattttggataattcgcgcaccaacaatttctatttcctttatgatcgttacaaaagacgtataatgccgtatccccaaaagtaaaataatcaggacgaataattctaataaactcagaacaatatctcgcatccatatgtttggagcaaatatcggaataagtagacatagccggtttccgttttgcacgtaaccattctaaacaattggggtttccaggatcgtttctacaaaatccagtcatgaaatcgtcacaatgttctgtcttgtaattattattaaatatttttggacagtgtttggtatttgtcttagaacaacattttgccacgctatcactatcgcccaggagataatccttttttataaaatgacatcgttgcccggatgctatataatcagtagcgtgttttaaatccttaatatattcaggagttacctcgttctgataatagattaatgatccaggacgaaatttgaaagaactacatggttctccatgaattaatacatattgtttagcaaattcaggaactataaaactactacaatgatctatcgacataccatctatcaaacaaaacttgggtttaatttctcccggagatgtttcataatagtacgtataactttcttctgcaaacttaacagctctattatattcaggataattaaaacctaattccatatatttgtctcgtatatctgctattcctggtgctattttgattctattaagagtaacagctgcccccattcttaataatcgtcagtatttaaactgttaaatgttggtatatcaacatctaccttatttcccgcagtataaggtttgttgcaggtatactgttcaggaatggttacatttatacttcttctatagtcctgtctttcgatgttcatcacatatgcaaagaacagaataaacaaaataatgtaagaaataatattaaatatctgtgaattcgtaaatacattgattgccataataattacagcagctacaatacacacaatagacattcccacagtgttgccattacctccacgatacatttgagttactaagcaataggtaataactaagctagtaagaggcaatagaaaagatgagataaatatcatcaatatagagattagaggagggctatatagagccaagacgaacaaaatcaaaccgagtaacgttctaacatcattatttttgaagattcccaaataatcattcattcctccataatcgttttgcatcatacctccatctttaggcataaacgattgctgctgttcctctgtaaataaatctttatcaagcactccagcacccgcagagaagtcgtcaagcatattgtaatatcttaaataactcatttatatattaaaaaatgtcactattaaagatggagtataatctttatgccgaactaaaaaaaatgacttgtggtcaacccctaagtctttttaacgaagacggggatttcgtagaagttgaaccgggatcatcctttaagtttctgatacctaagggattttacgcctctccttccgtaaagacgagtctagtattcgagacattaacaacgaccgataataaaatcactagtatcaatccaacaaatgcgccaaagttatatcctcttcaacgcaaagtcgtatctgaagtagtttctaatatgaggaaaatgatcgaatcaaaacgtcctctatacatcactcttcacttggcgtgtggatttggtaagactattaccacgtgttatcttatggctacacacggtagaaaaaccgtcatttgcgtacccaataaaatgttaatacatcaatggaagacacaggtagaggcagtcggattggaacataagatatccatagatggagtaagtagtctattaaaggaactaaagactcaaagtccggatgtattaatagtagtcagtagacatctgacaaacgatgccttttgtaaatatatcaataagcattatgatttgttcatcttggatgaatcacatacgtataatctgatgaacaatacagcagttacaagatttttagcgtattatcctccgatgatgtgttattttttaactgctacacctagaccatctaaccgaatttattgtaacagtattattaatattgccaagttatccaatctaaaaaaaactatctatgcagtagatagtttttttgagccatattccacagataatattagacatatggtaaaacgactagatggaccatctaataaatatcatatatataccgagaagttattatctgtagacgagcctagaaatcaacttattcttgataccctggtagaagaattcaagtcaggaactattaatcgcattttagttattactaaactacgtgaacatatggtattattctacaaacgattattagattttttcggaccagaggttgtatttataggagacgcccaaaatagacgtactccagatatggtcaaatcaatcaaggaactaaatagatttatattcgtatccaccttattttattccggtactggtttagatattcctagtttggattcgttgttcatttgctcggcagtaatcaacaatatgcaaatagagcaattactagggagggtatgtcgagaaacagaactattagataggacggtatatgtatttcctaacacatccatcaaagaaataaagtacatgataggaaatttcatgcaacgaattattagtctgtctgtagataaactaggatttaaacaaaaaagttatcggaaacatcaagaatccgatcccacttctgcatgtacaacatcatccagagaagaacgtgtattaaatagaatatttaactcgcaaaatcgttaagaagtttaagcgacgatccgcatgctgcgcaggccagtgtattacccctcatagtattaatataatccaatgatacttttgtgatgtcggaaatcttaaccaatttagactgacaggcagaacacgtcatgcaatcatcatcgtcatcgataactgtagtcttgggcttctttttgcgactcttcattccggaacgcacattggtgctatccatttaggtagtaaaaaataagtcagaatatgccctataacacgatcgtgcaaaacctggtatatcgtctctatctttatcacaatatagtgtatcgacatttttattattattgacctcgtttatcttggaacatggaatgggaacatttttgttatcaacggccatctttgccttaattccagatgttgtaaaattataactaaacagtctatcatcgacacaaatgaaattcttgtttagacgtttgtagtttacgtatgcggctcgttcgcgtctcattttttcagatattgcaggtactataatattaaaaataagaatgaaataacataggattaaaaataaagttatcatgacttctagcgctgatttaactaacttaaaagaattacttagtctgtacaaaagtttgagattttcagattctgcggctatagaaaagtataattctttggtagaatggggaacatctacttactggaaaataggcgtgcaaaaggtagctaatgtcgagacgtcaatatctgattattatgatgaggtaaaaaataaaccgtttaatattgatccgggctattacattttcttaccggtatattttgggagcgtctttatttattcgaagggtaaaaatatggtagaacttggatctggaaactcttttcaaataccagatgatatgcgaagtgcgtgtaacaaagtattagacagcgataacggaatagactttctgagatttgttttgttaaacaatagatggataatggaagatgctatatcaaaatatcagtctccagttaatatatttaaactagctagtgagtacggattaaacatacccaaatatttagaaattgaaatagaggaagacacattatttgacgacgagttatactctattatagaacgctctttcgatgataaatttccaaaaatatccatatcgtatattaagttgggagaacttagacggcaagttgtagactttttcaaattctcattcatgtatattgagtccatcaaggtagatcgtataggagataatatttttattcctagcgttataacaaaatcaggaaaaaagatattagtaaaagatgtagaccatttaatacgatccaaggttagagaacatacatttgtaaaagtaaaaaagaaaaacacattttccattttatacgactatgatggaaacggaacagaaactagaggagaagtaataaaacgaattatagacactataggacgagactattatgttaacggaaagtatttctctaaggttggtagtgcaggcttaaagcaattgactaataaattagatattaatgagtgcgcaactgtcgatgagttagttgatgagattaataaatccggaactgtaaaacgaaaaataaaaaaccaatcagcatttgatttaagcagagaatgtttgggatatccagaagcggattttataacgttagttaataacatgcggttcaaaatagaaaattgtaaggttgtaaatttcaatattgaaaatactaattgtttaaataacccgagtattgaaactatatatggaaactttaaccagttcgtctcaatctttaatgtcgtcaccgatgtcaaaaaaagattattcgagtgaaataatatgcgcctttgatataggtgcaaaaaatcctgccagaactgttttagaagtcaaggataactccgttagggtattggatatatcaaaattagactggagttctgattgggaaaggcgcatagctaaagatttgtcacaatatgaatacactacagttcttctagaacgtcagcctagaaggtcgccgtatgttaaatttatctattttattaaaggctttttatatcatacatcggctgccaaagttatttgcgtctcgcctgtcatgtctggtaattcatatagagatcgaaaaaagagatcggtcgaagcatttcttgattggatggacacattcggattgcgagactccgttccggatagacgcaaattagacgatgtagcggatagtttcaatttggctatgagatacgtattagataaatggaatactaattatacaccttataataggtgtaaatctagaaattacataaaaaaaatgtaataacgttagtaacgccattatggataatctatttacctttctacatgaaatagaagatagatatgccagaactatttttaactttcatctaataagttgcgatgaaataggagatatatatggtcttatgaaagaacgcatttcctcagaggatatgtttgataatatagtgtataataaagatatacatcctgccattaagaaactagtgtattgcgacatccaacttactaaacacattattaatcagaatacgtatccggtatttaacgattcttcacaagtgaaatgttgtcattatttcgacataaactcagataatagcaatattagctctcgtacagtagagatatttgagagggaaaagtcatctcttgtatcatatattaaaactaccaataagaagagaaaggtcaattacggcgaaataaagaaaactgttcatggaggcactaatgcaaattacttttccggtaaaaagtctgacgagtatctgagtactacagttagatccaacattaatcaaccttggatcaaaaccatctctaagaggatgagagttgatatcattaatcactctatagtaacgcgtggaaaaagctctatattacaaactatagaaattatttttactaatagaacatgtgtgaaaatattcaaggattctactatgcacattattctatccaaggacaaggatgaaaaggggtgtatacacatgattgacaaattattctatgtctattataatttatttctgttgttcgaagatatcatccaaaacgagtactttaaagaagtagctaatgttgtaaaccacgtactcacggctacggcattagatgagaaattattcctaattaagaaaatggctgaacacgatgtttatggagttagcaatttcaaaatagggatgtttaacctgacatttattaagtcgttggatcataccgttttcccctctctgttagatgaggatagcaaaataaagttttttaaggggaaaaagctcaatattgtagcattacgatctctggaggattgtataaattacgtgactaaatccgagaatatgatagaaatgatgaaggaaagatcgactattttaaatagcatagatatagaaacggaatcggtagatcgtctaaaagaattgcttctaaaatgaaaaaaaacactaattcagaaatggatcaacgactagggtataagtttttggtgcctgatcctaaagccggagttttttatagaccgttacatttccaatatgtatcgtattctaattttatattgcatcgattgcatgaaatcttgaccgtcaagcggccactcttatcgtttaagaataatacagaacgaattatgatagaaattagcaatgttaaagtgactcctccagattactcacctataatcgcgagtattaaaggtaagagttatgacgcattagccacgttcactgtaaatatctttaaagaggtaatgaccaaagagggtatatccatcactaaaataagtagttatgagggaaaagattctcatttgataaaaattccgctactaataggatacgggaataaaaatccacttgatacagccaagtatcttgttcctaatgtcataggtggagtctttatcaataaacaatctgtcgaaaaagtaggaattaatctagtagaaaagattacaacatggccaaaatttagggttgttaagccaaactcattcactttctcgttttcctccgtatcccctcctaatgtattaccgacaagatatcgccattacaagatatctctggatatatcacaattggaagcgttgaatatatcatcgacaaagacatttataacggtcaatattgttttgctgtctcaatatttatctagagtgagtctagaattcattagacgtagtttatcatacgatatgcctccagaagttgtctatctagtaaacgcgataatagatagtgctaaacgaattactgaatctattactgactttaatattgatacatacattaatgacctggtggaagctgaacacattaaacaaaaatctcagttaacgatcaacgagttcaaatatgaaatgctgcataactttttacctcatatgaactatacacccgatcaactaaagggattttatatgatatctttactaagaaagtttctctactgtatcttccacacttctagatatccagatagagattcgatggtttgtcatcgcatcctaacgtacggcaaatattttgagacgttggcacatgatgaattagagaattacataggcaacatccgaaacgatatcatgaacaatcacaagaacagaggcacttacgcggtaaacattcatgtactaacaactcccggacttaatcacgcgttttctagcttattgagtggaaagttcaaaaagtcagacggtagttatcgaacacatcctcactattcatggatgcagaatatttctattcctaggagtgttggattttatccggatcaagtaaagatttcaaagatgttttctgtcagaaaataccatccaagtcaatatctttacttttgttcatcagacgttccggaaagaggtcctcaggtaggtttagtatctcaattgtctgtcttgagttccattacaaatatactaacgtctgagtatttggatttggaaaagaaaatttgtgagtatatcagatcatattataaagatgatataagttactttgaaacaggatttccaatcactatagaaaatgctctagtcgcatctcttaatccaaatatgatatgtgattttgtaactgactttagacgtagaaaacggatgggattcttcggtaacttggaggtaggtattactttagttagggatcacatgaatgaaattcgcattaatattggagcgggaagattagtcagaccattcttggttgtggataacggagagctcatgatggatgtgtgtccggagttagaaagcagattagacgacatgacattctctgacattcagaaagagtttccgcatgtcatcgaaatggtagatatagaacaatttacttttagtaacgtatgtgaatcggttcaaaaatttagaatgatgtcaaaggatgaaagaaagcaatacgatttatgtgactttcctgccgaatttagagatggatatgtagcatcttcattagtgggaatcaatcacaattctggacccagagctattcttggatgtgctcaagctaaacaagctatctcttgtctgagctcggatatacgaaataaaatagacaatggaattcatttgatgtatccagagaggccaatcgtgattagtaaggctttagaaacttcaaagattgcggctaattgcttcggccaacatgttactatagcattaatgtcgtacaaaggtatcaatcaagaggatggaattatcatcaaaaaacaatttattcagagaggcggtctcgatattgttacagccaagaaacatcaagtagaaattccattggaaaactttaataacaaagaaagagataggtctaacgcctattcaaaattagaaagtaatggattagttagactgaatgctttcttggaatccggagacgctatggcacgaaatatctcatcaagaactcttgaagatgattttgctagagataatcagattagcttcgatgtttccgagaaatataccgatatgtacaaatctcgcgttgaacgagtacaagtagaacttactgacaaagttaaggtacgagtattaaccatgaaagaaagaagacccattctaggagacaaatttaccactagaacgagtcaaaagggaacagtcgcgtatgtcgcggatgaaacggaacttccatacgacgaaaatggtatcacaccagatgtcattattaattctacatccatcttctctagaaaaactatatctatgttgatagaagttattttaacagccgcatattctgctaagccgtacaacaataagggagaaaaccgacctgtctgttttcctagtagtaacgaaacatccatcgatacatatatgcaattcgctaaacaatgttatgagcattcaaatccgaaattgtccgatgaagaattatcggataaaatcttttgtgaaaagattctctatgatcctgaaacggataagccttatgcatccaaagtattttttggaccaatttattacttgcgtctgaggcatttaactcaggacaaggcaaccgttagatgtagaggtaaaaagacgaagctcattagacaggcgaatgagggacgaaaacgtggaggaggtatcaagttcggagaaatggagagagactgtttaatagcgcatggtgcagccaatactattacagaagttttgaaagattcggaagaagattatcaagatgtgtatgtttgtgaaaattgtggagacatagcagcacaaatcaagggtattaatacatgtcttagatgttcaaaacttaatctctctcctctcttaacaaaaattgataccacgcacgtatctaaagtatttcttactcaaatgaacgccagaggcgtaaaagtcaaattagatttcgaacgaaggcctccttcgttttataaaccattagataaagttgatctcaagccgtcttttctggtgtaatattctagtttggtagtagatacatatcaatatcatcaaattcgagatccgaattataaaatgggcgtggattgttaactatagaatcggacgtctgatattcgaaaatctgtggagtttcaggttttggtggaggtgtaactgctacttgggatactgaagtctgatattcagaaagctgtggatgttctggttcggcatccaccgatggtgtcacatcactaatcggttcggtaacgtctgtggatggaggtgctacttctacagaacctgtagcctcagttgtcaacggagatacatttttaatgcgagaaaatgtataatttggtaatggtttcttatgtggatctgaagaagaggtaagatatctactagaaagataccgatcacgttctagttctcttttgtagaacttaactttttctttctccgcatctagttgatattccaacctcttcacgttactacgttcagattccaattcacgttcgcatgggttacctccgcagtttttacgagcgatttcacgttcagccttcatgcgtctctccctctctctatcgagtttatcagagcagtctttctgaaggcgatcgaactccataaatttctccaacgctttgattgtttccatagatttccgaagttcagcttttaggactgtgattctttttctttcgaattcacagctggatgtacaaccgtttccattaccgccatctctaagtttcttttctagatcggcaacatttcatccccatgccttttacattcctcgagtctactgtcgtcgaaatatcgttccagctccttttcgacatcaataactttagcacgttgtctctcaagctctcttttgtagttatctgattccctggcacgtttaagatcttcatgcaattgagtcagctcttaacttcctctcttgcttcttcgtcatagtacgcgcaatcactgtgagatccattgttaccacgtctacactcggcgagctcgcgtttaagagattcaatttcccgtttgtattggtccatgtttccattgctaccaccattagatttacaggctgctagttgtcgttcgagatcagaaatacgggttttcttggaattgatttcgtcgatgtacttggcatcgaaacacttattaagttctttttccaattctacgattttatttctttcgcgagtcaattccctcctgtagtaactatctgttttgtcagattcacgctctctacgtagactttcttgcaagttactaatttgttccctagcacgtccgagtttagttttatatgctgaatagagttctgattcatcctttgagcagatctctagcgatcgtttaagattcctaattctagtctttagcctatttacctcctcagaagatgttccgttaccgttgcgtttacactcgttaagctgtctatcaagatccatgattctatctctaagacgttgcatctctctttccatatcagcattgctttcattattacgtctgcagtcactcaactgtctttcaatatctgagattctatctctaagacgtcgcatctctctctgtttcggcattggtttcattattacgtttacagtcgttcaactgtctttcaagatctgatattctagattggagtctgctaatctctgtagcattttcacggcattcactcagttgtctttcaagatctgaaattttagattggagtctgctaatctctgtaagatttcctcctccgctctcgatgcagtcggtcaacttattctctagttctctaatacgcgaacgcagtgcatcaacttcttgcgtgtcttcctggttgcgtgtacattcatcgagatctctaacgcgtcgtcgttcttcctcaagttctctgcgtactacagaaagcgtgtccctatcttgttgatatttagcaatttctgattctagagtactgattttgcttacgtagttactaatagttgtcttggccttatcaagatcctccttgtatttgtcgcattccttgatatccctacgaagtctggacagttcccattcgacattacgacgtttatcgatttcagctcggagatcgtcatcgcgttgttttagccacatacgactgagttcaagttctcgttgacaagatccatctacttttccattcctaatagtatccagttccttttctagttctgaacgcatttctcgttccctatcaagcgattctctcaattctcggatagtcttcttatcaatttctaataaatctgaaccatcatctgtcccattttgaatatccctgtgttctttgatctcttttgtaagtcggtcgattctttcggttttataaacagaatccctttccaaagtcctaatcttactgagtttatcactaagttctgcattcaattcggtgagttttctcttggcttcttccaactctgttttaaactctccactatttccgcattcttcctcgcatttatctaaccattcaattagtttattaataactagttggtaatcagcgattcctatagccgttcttgtaattgtgggaacataattaggatcttctaatggattgtatggcttgatagcatcatctttatcattattagggggatggacaaccttaattggttggtcctcatctcctccagtagcgtgtggttcttcaataccagtgttagtaataggcttaggcaaatgcttgtcgtacgcgggcacttcctcatccatcaagtatttataatcgggttctacttcagaatattcttttctaagagacgcgacttcgggagttagtagaagaactctgtttctgtatctatcaacgctggaatcaatactcaagttaaggatagcgaatacctcatcgtcatcatccgtatcttctgaaacaccatcatatgacatttcatgaagtctaacgtattgataaatagaatcagatttagtattaaacagatccttaacctttttagtaaacgcatatgtatattttagatctccagatttcataatatgatcacatgccttaaatgtcagtgcttccatgatataatctggaacactaatgggtgacgaaaaagatacagcaccatatgctacgttgataaataaatctgaaccactaagtagataatgattaatgttaagaaagaggaaatattcagtgtataggtatgtcttggcgtcatatcttgtactaaacacgctaaacagtttgttaatgtgatcaatttccaatagattaattagagcagcgggaataccaacaaacatattaccacatccgtattttctatgaatatcacatatcatgttaaaaaatcttgatagaagagcgaatatctcgtctgacttaatgagtcgtagttcagcagcaacataagtcataactgtaaatagaacatactttcctgtagtgttgattctagactccacatcaacaccattattaaaaatagttttatatacatctttaatctgctctccgttaatcgtcgaacgttctagtatacggaaacactttgatttcttatctgtagttaatgacttagtgatatcacgaagaatattacgaattacatttcttgtttttcttgagagacctgattcagaactcaactcatcgttccatagtttttctacctcagtggcgaaatctttggagtgcttggtacatttttcaataaggttcgtgacctccatttattataaaaaatttattcaaaacttaactacaatcgggtaattataagatcgtagatctcccatgtggcggaatactaccatctatcgcatgtggatggacagtaggtaatggccatgggaacagtaatgtttgcatatttatctttcttgctagtattactgcatattgtcccaatgtttcgatgtgatgttctaacctatcaactgccgctgtatcacaacaatagtgtccgatgaaattaagattatgatccaatgtgtttaatatatgattatcaagtcttatacgatccgcgtcttttttgacaggatcaggttcttctacaggaagaagtttcggcctcttatgatattcatgtctgggaaacggtggtctagggtgaggctccggtatcggagtgggttttggattataatcatcatcgtctatgacatcatcttcgacttcgatatttattttgctatcttgatgatgtcctgtatcagttgcattttcagcactcgactgaatattagcgcattcattgtctattattaccatatttctaaacccaaaatgtatgtgttgaacatcagtactatcgttgatgagtcttatagcatgaattcgcttatcgttatcgggtttatcttctgtcaccttagcaattccttttttattaaactctacataatcatatccatttctattgtttgttctaatataaacgagtatagcatcattgctaaatttttcaatagtatcaaaaacagaatatcctaaaccatataatatatattcaggaacactcaaactaaatgtccaggattctcctaaatacgtaaactttaatagtgcgaaatcattcaaaaatctaccacttatagatagatagtacataaatgcgtatagtagtctacctatctctttattatgaaaaccggcattacgatcatatatgtcgtgatatacctgtgatccgtttacgttaaaccataaatacatgggtgatcctataaacatgaatttatttctaattctcagagctatagttaattgaccgtgtaatatttgcttacatgcatacttgatacgcttattaataagatttttatcattgctcgttatttcagaatcgtatatataaggagtaccatcgtgattcttaccagatattatacaaaatactatatataaaatatattgacccacgttagtaatcatataaatgtttaacgttttaaattttgtattcaatgatccattatcatacgctatcatggtcttgtaatattcattctttaaaatataatattgtgttagccattgcattggagctcctaatggagattttctattctcatccattttaggataggctttcataaagtccctaataacttcgtgaataatgtttctatgttttctactgatgcatgtatttgcttcgatttttttatcccatgtttcatctatcatagatttaaacgcagtaatgctcgcaacattaacatcttgaaccgttggtacaattccgttccataaatttataatgttcgccatttatataactcattttttgaatatacttttaattaacaaaagagttaagttactcatatggacgccgtccagtctgaacatcaatctttttagccagagatatcatagccgctcttagagtttcagcgtgattttccaacctaaatagaacttcatcgttgcgtttacaacacttttctatttgttcaaactttgttgttacattagtaatctttttttccaaattagttagccgttgtttgagagtttcctcattgtcgtcttcatcggctttaacaattgcttcgcgtttagcctctggctttttagcagcctttgtagaaaaaaattcagttgctggaattgcaagatcgtcatctccggggaaaagagttccgtccatttaaagtacagattttagaaactgacactctgcgttatttatatttggtacaacacatggattataaatattgatgttaataacatcagaaaatgtaaagtctatacattgttgcatcgtgttaaattttctaatggatctagtattattgggtccaacttctgcctgaaatccaaatatggaagcggatacaaaaccgtttcctggataaaccacacatctccacttttgctttacatcagaaattgtgtcgttgacatcttgaactctcctatctaatgccggtgttccacctatagattttgaatattcgaatgctgcatgagtagcattaaattccttaatattgccataattttcatatattgagtaaccctggataaaaagtaaacacaccgcagccgtcgctaccacaataaaaaaaattgatagagagttcatttataatctattagaagctgacaaaatttttttacacgcatcagacaatgctttaataaatagttcaacatctacttttgtcatatcgaaccgatggtatgattctaacctagaattacatccgaaaaagttgactatgttcatagtcattaagtcattaacaaacaacattccagactctggattataagacgatactgtttcgtcacaattacctaccttaatcatgtgattatgaatattggctattagagcaccttctaagaaatctataatatctttgaaacacgatttaaaatcaaaccacgaatatacttctacgaagaaagttagtttacccataggagaaataactataaatggagatctaaatacaaaatccggatctatgatagttttaacattattatattctctattaaatacctccacatctaaaaatgttaattttgaaactatgtcttcgtttattaccgtacctgaactaaacgctataagctctattgtttgagaactctttaaacgatattcttgaaatacatgtaacaaagtttcctttaactcggtcggtttatctaccatagttacagaatttgtatccttatctataatataataatcaaaatcgtataaagttatataattatcgcgttcagattgtgatcttttcaaatagactaaaaaccccatttctctagtaagtatcttatgtatatgtttgtaaaatatcttcatggtgggaatatgctctaccgcagttagccattcctcattgacagcggtagatgtattagacaaaactattccaatgtttaacaagggccattttacgagattattaaatccttgtttgataaatgtagccaatgagggttcgagttcaacgacgattgaattctcttcccgcggatgctgcatgatgaacgacgggatgttgttcgattgatttggaattctttttcgactttttgtttatattaaatattttaaaatttatagcggatagcaattcatgtaccacggataatgtagacgcgtattgcgcatcgatatctttattattagataaatttatcaataaatgtgagaagtttgcctcgttaaggtcttccatttaaatattatataaacatttgtgtttgtatcttattcgtcttttatggaatagttttttactagtaaagctgcaattacacactttgtccgtaaaacataaatataaacaccagcttttatcaatcgttccaaaaagtcgacggcggacatttttaacatggcatctattttaaatacacttaggtttttggaaaaaacatcattttataattgtaacgattcaataactaaagaaaagattaagattaaacataagggaatgtcatttgtattttataagccaaagcattctaccgttgttaaatacttgtctggaggaggtatatatcatgatgatttggttgtattggggaaggtaacaattaataatctaaagatgatgctattttacatggatttatcatatcatggagtgacaagtagtggagcaatttacaaattgggatcgtctatcgatagactttctctaaataggactattgttacaaaagttaataattatgatgatacattttttgacgacgatgattgatcgctattgcacaattttgtttttgtactttctaatatagtgtttaggttctttttcatatgagaatattgatttactaaaatatctatgtttaacttttgttctatgacgtccttatcggcggtatcggtacatatacgtaattcaccttcacaaaatacggagtcttcgataataatagccaatcgattattggatctagctgtctgtatcatattcaacatgtttaatatatcctttcgtttcccctttacaggcatcgatcgtagcatattttccgcgtctgatatggaaatgttaaaactacaaaaatgcgtaatgttagcccgtcctaatattggtacgtgtctataagtttggcatagtagaataatagacgtgtttaaatgccttccaaagtttaagaattctattagagtattgcattttgatagtttatcgcctacatcatcaaaaataagtaaaaagtgtgctgattttttatgattttgtgcgacagcaatacatttttctatgttacttttagttcgtatcagattatattctagagattcctgactactaacgaaattaatatgatttggccaaatgtatccatcataatctgggttataaacgggtgtaaacaagaatatatgtttatattttttaactagtgtagaaaacagagatagtaaatagatagtttttccagatccagatcctcctgttaaaaccattctaaacggcatttttaataaattttctcttgaaaattgtttttcttggaaacaattcataattatatttacagttactaaattaatttgataataaatcaaaatatggaaaactaaggttgttagtagggaggagaacaaagaaggcacatcgtgatataaataacatttattatcatgatgacaccagaaaacgacgaagagcagacatctgtgttctccgctactgtttacggagacaaaattcagggaaagaataaacgcaaacgcgtgattggtctatgtattagaatatctatggttatttcactactatctatgattaccatgtccgcgtttctcatagtgcgcctaaatcaatgcatgtctgctaacgaggctgctattactgacgccgctgttgccgttgctgctgcatcatctactcatagaaaggttgcgtctagcactacacaatatgatcacaaagaaagctgtaatggtttatattaccagggttcttgttatatattacattcagactaccagttattctcggatgctaaagcaaattgcactgcggaatcatcaacactacccaataaatccgatgtcttgactacctggctcattgattatgttgaggatacatggggatctgatggtaatccaattacaaaaactacatccgattatcaagattctgatgtatcacaagaagttagaaagtatttttgtgttaaaacaatgaactaatatttatttttgtacattaataaatgaaatcgcttaatagacaaactgtaagtaggtttaagaagttgtcggtgccggccgctataatgatgatactctcaaccattattagtggcataggaacatttctgcattacaaagaagaactgatgcctagtgcttgcgccaatggatggatacaatacgataaacattgttatttagatactaacattaaaatgtctacagataatgcggtttatcagtgtcgtaaattacgagctagattgcctagacctgatactagacatctgagagtattgtttagtattttttataaagattattgggtaagtttaaaaaagaccaatgataaatggttagatattaataatgataaagatatagatattagtaaattaacaaattttaaacaactaaacagtacgacggatgctgaagcgtgttatatatacaagtctggaaaactggttaaaacagtatgtaaaagtactcaatctgtactatgtgttaaaaaattctacaagtgacaacaaaaaatgaattaataataagtcgttaacgtacgccgccatggacgccgcgtttgttattactccaatgggtgtgttgactataacagatacattgtatgatgatctcgatatctcaatcatggactttataggaccatacattataggtaacataaaaactgtccaaatagatgtacgggatataaaatattccgacatgcaaaaatgctactttagctataagggtaaaatagttcctcaggattctaatgatttggctagattcaacatttatagcatttgtgccgcatacagatcaaaaaataccatcatcatagcatgcgactatgatatcatgttagatatagaagataaacatcagccattttatctattcccatctattgatgtttttaacgctacaatcatagaagcgtataacctgtatacagctggagattatcatctaatcatcaatccttcagataatctgaaaatgaaattgtcgtttaattcttcattctgcatatcagacggcaatggatggatcataattgatgggaaatgcaatagtaattttttatcataaaagttgtaaagtaaataataaaacaataaatattgaactagtagtacgtatattgagcaatcagaaatgatgctggtacctcttatcacggtgaccgtagttgcgggaacaatattagtatgttatatattatatatttgtaggaaaaagatacgtactgtctataatgacaataaaattatcatgacaaaattaaaaaagataaagagttctaattccagcaaatctagtaaatcaactgatagcgaatcagactgggaggatcactgtagtgctatggaacaaaacaatgacgtagataatatttctaggaatgagatattggacgatgatagcttcgctggtagtttaatatgggataacgaatccaatgttatggcgcctagcacagaacacatttacgatagtgttgctggaagcacgctgctaataaataatgatcgtaatgaacagactatttatcagaacactacagtagtaattaatgaaacggagactgttgaagtacttaatgaagataccaaacagaatcctaactattcatccaatcctttcgtaaattataataaaaccagtatttgtagcaagtcaaatccgtttattacagaacttaacaataaatttagtgagaataatccgtttagacgagcacatagcgatgattatcttaataagcaagaacaagatcatgaacacgatgatatagaatcatcggtcgtatcattggtgtgattagtttcctttttataaaattgaagtaatatttagtattattgctgccgtcacgttgtacaaatggagatattccctgtattcggcatttctaaaattagcaattttattgctaataatgactgtagatattatatagatacagaacatcaaaaaattatatctgatgagatcaatagacagatggatgaaacggtacttcttaccaacatcttaagcgtagaagttgtaaatgacaatgagatgtaccatcttattcctcatagattatcgacgattatactctgtattagttctgtcggaggatgtgttatctctatagataatgacatcaatggcaaaaatattctaacctttcccattgatcatgctgtaatcatatccccactgagtaaatgtgtcgtagttagcaagggtcctacaaccatattggttgttaaagcggatatacctagcaaacgattggtaacatcgtttacaaacgacatactatatgtaaacaatctgtcactgattaattatttgccgttgtctgtattcattattagacgagtcaccgactatttggatagacacatatgcgatcagatatttgctaataataagtggtattcccttataaccatcgacgataagcaatatcctattccatcaaactgtataggtatgtcctctgccaagtacataaattctagcatcgagcaagatactttaatccatgtttgtaacctcgagcatccgttcgactcagtatacaaaaaaatgcagtcgtacaattctctacctatcaaggaacaaatattgtacggtagaattgataatataaatatgagcattagtatttctgtggattaatagatttctagtatggggatcattaatcatctctaatctctaaatacctcataaaacgaaaaaaaagctattatcaaatactgtacggaatggattcattctcttctctttttatgaaactctgttgtatatctactgataaaactggaagcaaaaaatctgatagaaagaataagaataagatcaaggattatatggaacacgattattataaaataacaatagttcctggttcctcttccacgtctactagctcgtggtattatacacatgcctagtaatagtctctttgcgttgacggaaagcagactagaaataacaggctaaaatgttcagacaccataatagttcccaacccagataataacagagttccatcaacacattcctttaaactcaatcccaaacccaaaaccgttaaaatgtatccggccaattgatagtagataatgaggtgtacagcgcatgataatttacacagtaaccaaaatgaaaatactttagtaattataagaaatatagacggtaatgtcatcatcaacaatccgataatatgcctgagagtaaacattgacggataaaacaaaaatgctccgcataactctatcatggcaataacacaaccaaatacttgtaagattcctaaattagtagaaaatacaacgaatatcgatgtataagtgatctcgagaaataataagaataaagtaatgcccgtaaagataaacatcaacattgtttggtaatcattaaaccaattagtatgaagttgaactaatttcacagtagattttattccagtgttatcctcgcatgtataagtacctggtaagatatctttatattccataatcaatgagacatcactatctgataacgaatgaagtctagcactagtatgccatttacttaatattgtcgtcttggaagttttattataagttaaaatatcatggttatccaatttccatctaatatactttgtcggattatctatagtacacggaataatgatggtatcattacatgctgtatactctatggtctttgtagttgttataacaaccaacgtatagaggtatatcaacgatattctaactcttgacattttttatttatttaaaatgatacctttgttatttattttattctattttgctaacggtattgaatggcataagtttgaaacgagtgaagaaataatttctacttacttattagacgacgtattatacacgggtgttaatggggcggtatacacattttcaaataataaactaaacaaaactggtttaactaataataattatataacaacatctataaaagtagaggatgcggataaggatacattagtatgcggaaccaataacggaaatcccaaatgttggaaaatagacggttcagacgacccaaaacatagaggtagaggatacgctccttatcaaaatagcaaagtaacgataatcagtcacaacggatgtgtactatctgacataaacatatcaaaagaaggaattaaacgatggagaagatttgacggaccatgtggttatgatttattcacggcggataacgtaattccaaaagatggtttacgaggagcattcgtcgataaagacggtacttatgacaaagtttacattcttttcactgatactatcggctcaaagagaattgtcaaaattccgtatatagcacaaatgtgcctaaacgacgaaggtggtccatcatcattgtctagtcatagatggtcgacgtttctcaaagtcgaattagaatgtgatatcgacggaagaagttatagacaaattattcattctagaactataaaaacagataatgatacgatactatatgtattcttcgatagtccttattccaagtccgcattatgtacctattctatgaataccattaaacaatctttttctacgtcaaaattggaaggatatacaaagcaattgccgtctccagctcctggtatatgtttaccagctggaaaagttgttccacataccacgtttgaagtcatagaacaatataatgtactagatgatattataaagcctttatctaaccaacctatcttcgaaggaccgtctggtgttaaatggttcgatataaaggagaaggaaaatgaacatcgggaatatagaatatacttcataaaagaaaattctatatattcgttcgatacaaaatctaaacaaactcgtagctcgcaagtcgatgcgcgactattttcagtaatggtaactgcgaaaccgttatttatagcagatatagggataggagtaggaatgccacaaatgaaaaaaatacttaaaatgtaatcttaatcgagtacaccacacgacaatgaacaaacataagacagattatgctggttatgcttgctgcgtaatatgcggtctaattgtcggaattatttttacagcgacactattaaaagttgtagaacgtaaattagttcatacaccattaatagataaaacgataaaagatgcatatattagagaagattgtcctactgactggataagctataataataaatgtatccatttatctactgatcgaaaaacctgggaggaaggacgtaatgcatgcaaagctctaaattcaaattcggatctaattaagatagagactccaaacgagttaagttttttaagaagccttagacgaggctattgggtaggagaatccgaaatattaaaccagacaaccccatataattttatagctaagaatgccacgaagaatggaactaaaaaacggaaatatatttgtagcacaacgaatactcccaaactgcattcgtgttacactatataacaattacactacatttttatcataccactacttcggttagatgttttagaaaaaaataaatatcgccgtaccgttcttgtttttataaaaataacaattaacaattatcaaattttttctttaatattttacgtggttgaccattcttggtggtaaaataatctcttagtgttggaatggaatgctgtttaatgtttccacactcatcgtatattttgacgtatgtagtcacatcgtttacgcaatagtcagactgtagttctatcatgcttcctacatcagaaggaggaacagttttaaagtctcttggttttaatctattaccgttagttttcatgaaatcctttgttttatccacttcacattttaaataaatgtccactatacattcttttgttaattttactagatcgtcatgggtcatagaatttataggttccgtagtccatggatccaaactagcaaacttcgcgtatacggtatcgcgattagtgtatacaccaactgtatgaaaattaagaaaacagtttaataaatcaacagaaatatttaatcctccgtttgatacagatgcgccatatttatggatttcggattcacacgttgtttgtctgaggtgttcgtctagtgttgcttctacgtaaacttcgattcccatatattctttattgtcagaatcgcataccgatttatcatcatacactgtttgaaaactaaatggtatacacatcaaaataataaataataacgagtacattctgcaatattgttatcgtaattggaaaaatagtgttcgagtgagttggattatgtgagtattggattgtatattttattttatattttgtaataagaataaaatgctaatgtcaagtttattccaatagatgtcttattaaaaacatatataataaataacaatggctgaatggcataaaattatcgaggatatctcaaaaaataataagttcgaggatgccgccatcgttgattacaagactacaaagaatgttctagctgctattcctaacagaacatttgccaagattaatccgggtgaaattattcctctcatcactaatcgtaatattctaaaacctcttattggtcagaaatattgtattgtatatactaactctctaatggatgagaacacgtatgctatggagttgcttactgggtacgcccctgtatctccgatcgttatagcgagaactcataccgcacttatatttttgatgggtaagccaacaacatccagacgtgacgtgtatagaacgtgtagagatcacgctacccgtgtacgtgcaactggtaattaaaataaaaagtaatattcatatgtagtgtcaattttaaatgatgatgatgaaatggataatatccatattgacgatgtcaataatgccggtattggcatacagttcatcgatttttagatttcattcagaggatgtggaattatgttatgggcatttgtattttgataggatctataatgtagtaaatataaaatataatccgcatattccatatagatataattttattaatcgcacgttaaccgtagatgaactagacgataatgtcttttttacacatggttattttttaaaacacaaatatggttcacttaatcctagtttgattgtctcattatcaggaaacttaaaatataatgatatacaatgctcagtaaatgtatcgtgtctcattaaaaatttggcaacgagtacatctactatattaacatctaaacataagacttattctctacatcggtccacgtgtattactataataggatacgattctattatatggtataaagatataaatgacaagtataatgacatctatgattttactgcaatatgtatgctaatagcgtctacattgatagtgaccatatacgtgtttaaaaaaataaaaatgaactcttaattatgctatgctattagaaatggataaaatcaaaattacggttgattcaaaaattggtaatgttgttaccatatcgtataacttggaaaagataactattgatgtcacacctaaaaagaaaaaagaaaaggatgtattattagcgcaatcagttgctgtcgaagaggcaaaagatgtcaaggtagaagaaaaaaatattatcgatattgaagatgacgatgatatggatgtagaaagcgcgtaatacgatctataaaaataagtatataaatactttttatttactgtactcttactgtgtagtggtgataccctactcgattatttttttaaaaaaaaaatacttattctgattcttctagccatttccgtgttcgtttgaatgccacatcgacgtcaaagataggggagtagttgaaatctagttctgcattgttggtacgcacctcaaatgtagtgttggatatcttcaacgtatagttgttgagtagtgatggttttctaaatagaattctcttcatatcattcttgcacgcgtacatttttagcatccatcttggaatcctagatccttgttctattcccaatggtttcatcaatagaagattaaacatatcgtacgaacacgatggagagtaatcgtagcaaaagtaagcatttcctttaatcttagatcccggatactggatatattttgcagccaacacgtgcatccatgcagcatttcctacatatacccggctatgcaccgcgtcatcatcgactgtacgatacataatgttaccgtgttgcttacattgctcgtaaaagactttcatcaatttgtctccttctccgtaaattccagtgggtcttaggcaacaagtatacaattttgctccattcatgattacggaattattggctttcataaccagttgctcggccatacgtttactttttgcgtatacatgtcctggtgatatatcataaagggtatgctcatggccgatgaatggatcaccgtgtttattgggtcctattgcttccatgctactagtatagatcaaatacttgattcctaggtccacacaagctgccaaaatagtctgtgttccataatagtttactttcatgatttcattatcggtgtattttccaaatacatccactagagcagccgtatgaataatcagatttaccccatctagcgcttctctcaccttatcaaagtcgtttatatcacattgtatatagtttataaccttaactttcgaggttattggttgtggatcttctacaatatctatgactctgatttcttgaacatcatctgcactaattaacagttttactatatacctgcctagaaatccggcaccaccagtaaccgcgtacacggccattgctgccactcataatatcagactacttattctattttactaaataatggctgtttgtataatagaccacgataatatcagaggagttatttactttgaaccagtccatggaaaagataaagttttaggatcagttattggattaaaatccggaacgtatagtttgataattcatcgttacggagatattagtcaaggatgtgattccataggcagtccagaaatatttatcggtaacatctttgtaaacagatatggtgtagcatatgtttatttagatacagatgtaaatatatttacaattattggaaaggcgttatctatttcaaaaaatgatcagagattagcgtgtggagttattggtatttcttacataaatgaaaagataatacattttcttacaattaacgagaatggcgtttgatatatcagttaatgcgtctaaaacaataaatgcattagtttacttttctactcagcaaaataaattagtcatacgtaatgaagttaatgatacacactacactgtcgaatttgatagggacaaagtagttgacacgtttatttcatataatagacataatgacaccatagagataagaggggtgcttccagaggaaactaatattggttgcgcggttagtatgacttacttgtataataagtatagttttaaactgattttagcagaatatataagacacagaaatactatatccggcaatatttattcggcattgatgacactagatgatttggctattaaacagtatggagacattgatctattatttaatgagaaacttaaagtagactccgattcgggactatttgactttgtcaactttgtaaaggatatgatatgttgtgattctagaatagtagtagctctatctagtctagtatctaaacattgggaattgacaaataaaaaatataggtgtatggcattagccgaacatatatctgatagtattccaatatctgagctatctagactacgatacaatctatgtaagtatctacgcggacacactgagagcatagaggataaatttgattattttgaagacgatgattcgtctacatgttctgccgtaaccgacagggaaacggatgtataattttttttatagcgtgaaggatatgataaaaaatataattgttgtatttatcccattccaatcaccttatatgattctgtaacacaataaaggagtcttatagatgtatagaggtcagatactggtttgataaactgtttattccacataagtatgtttgactttatggttagacccgcatactttaacaaatcactgaaaattggagttaggtattgacctctcagaatcagttgccgttctggaacattaaatgtattttttatgatatactccaacgcatttatgtgggcatacaacaagtcattactaatggaatattccaagagttttagttgtctagtatttaacaagagaagagatttcaacagactgtttatgaactcgaatgccgcctcattgtcgcttatattgatgatgtcgaattctcccaatatcatcaccgatgagtagctcatcttgttatcgggatccaagttttctaaagatgtcattaaaccctcgatcatgaatggatttatcatcatcgtttttatgttggacatgagcttagtccgtttgtccacatctatagaagatgatttctgaattatttcatatatctctctctttaactccaggaacttgtcaggatggtctactttaatatgttctcgtctaagagatgaaaatctttggatggttgcacgcgacttttctctaaaggatgacgttgcccaagatcctctcttaaatgaatccatcttatccttggacaagatggacagtctattttccttagatggtttaatatttttgttacccatgatctataaaggtagacctaatcgtctcggatgaccatatatttattttcagttttattatacgcataaattgtaaaaaatatgttaggtttacgaaaatgtctcgtggggcattaatcgtttttgaaggattggacaaatctggaaaaacaacacaatgtatgaacatcatggaatcaataccttcaaacacaataaaataccttaactttcctcagagatccactgtcactggaaagatgatagatgactatctaactcgtaaaaaaacctataatgatcatatagttaatctattattttgtgcaaatagatgggagtttgcatcttttatacaagaacaactagaacagggaattactttaatagttgatagatacgcattttctggagtagcgtatgccgccgctaaaggcgcgtcaatgactctcagtaagagttatgaatctggattgcctaaacccgacttagttatattcttggaatctggtagcaaagaaattaatagaaacgtcggtgaggaaatttatgaagatgttacattccaacaaaaggtattacaagaatataaaaaaatgattgaagaaggagatattcattggcaaattatttcttctgaattcgaggaagatgtaaagaaggagttgattaagaatatagttatagaggctatacacacggttactggaccagtggggcaactgtggatgtaatagtgaaattacattttttataaatagatgttagtacagtgttataaatggatgaagcatattactctggcaacttggaatcagtactcggatacgtgtccgatatgcataccgaactcgcatcaatatctcaattagttattgccaagatagaaactatagataatgatatattaaacaaggacattgtaaattttatcatgtgtagatcaaacttggataatccatttatctctttcctagatactgtatatactattatagatcaagagaactatcagactgagttgattaattcattagacgacaatgaaattatcgattgtatagttaataagtttatgagcttttataaggataacctagaaaatatagtagatgctatcattactctaaaatatataatgaataatccagattttaaaactacgtatgccgaagtactcggttccagaatagccgatatagatattaaacaagtgatacgtaagaatatactacaattgtctaataatatccgcgaacgatatttgtgaaaatattaaaaaaaaatactttttttattaaatgacgtcttttcgtgaatttagaaaattatgctgtgctatatatcacgcatcaggatataaagaaaaatctaaattaattagagactttataacagatagggatgataaatatttgatcattaagctattgcttcccggattagacgatagaatttataacatgaacgataaacaaattataaaattatatagtataatatttaaacaatctcaggaagatatgctacaagatttaggatacggatatataggagacactattaggactttcttcaaagagaacacagaaatccgtccacgagataaaagcattttaactttagaagaagtggatagttttttaactacgttatcatccgtaactaaagaatcgcatcaaataaaattattgactgatgtagcatctgtttgtacatgtaatgatttaaaatgtgtagtcatgcttattgataaagatctaaaaattaaagcgggtcctcggtacgtacttaacgctattagtcctaatgcctatgatgtgtttagaaaatctaataacttgaaagagataatagaaaattcatctaaacaaaatctagactctatatctatttctgttatgactccaattaatcccatgttagcggaatcgtgtgattctgtcaataaggcgtttaaaaaatttccatcaggaatgtttgcggaagtcaaatacgatggtgaaagagtacaagttcataaaaataataacgagtttgccttctttagtagaaacatgaaaccagtactctctcataaagtggattatctcaaagaatacataccgaaagcatttaaaaaagctacgtctatcgtattggattctgaaattgttcttgtagacgaacataatgtaccgctcccgtttggaagtttaggtatacacaaaaagaaagaatataaaaactctaacatgtgtttgttcgtgtttgactgtttgtactttgatggattcgatatgacggacattccattgtacgaacgaagatcttttctcaaagatgttatggttgaaatacccaatagaatagtattctcagagttgacgaatattagtaacgagtctcagttaactgacgtattggatgatgcactaacgagaaaattagaaggattggtcttaaaagatattaatggagtatacgaaccgggaaagagaagatggttaaaaataaagcgagactatttgaacgagggttccatggcagattctgccgatttagtagtactaggtgcctactatggtaaaggagcaaagggtggtatcatggcagtctttctaatgggttgttacgacgatgaatccggtaaatggaagacggttaccaagtgttcaggacacgatgataatacgttaagggagttgcaagaccaattaaagatgattaaaattaacaaggatcccaaaaaaattccagagtggttagtagttaataaaatctatattcccgattttgtagtagaggatccgaaacaatctcagatatgggaaatttcaggagcagagtttacatcttccaagtcccataccgcaaatggaatatccattagatttcctagatttactaggataagagaggataaaacgtggaaagaatctactcatctaaacgatttagtaaacttgactaaatcttaatagttacatacaaactgaaaattaaaataacactatttagttggtggtcgccatggatggtgttattgtatactgtctaaacgcgctagtaaaacatggcgaggaaataaatcatataaaaaatgatttcatgattaaaccatgttgtgaaagagtttgtgaaaaagtcaagaacgttcacattggcggacaatctaaaaacaatacagtgattgcagatttgccatatatggataatgcggtatccgatgtatgcaattcactgtataaaaagaatgtatcaagaatatccagatttgctaatttgataaagatagatgacgatgacaagactcctactggtgtatataattattttaaacctaaagatgccattcctgttatcatatctataggaaaggataaagatgtctgtgaactattaatctcatcagacatatcgtgtgcatgcgtggagttaaattcatatcacgtagccattcttcccatggatgtttccttttttaccaaaggaaatgcatcattgattattctcctgtttgatttctctatcgatgcggcacctctcttaagaagtgtaaccgataataatgttattatatctagacaccagcgtctacatgacgagcttccgagttccaattggttcaagttttacataagtataaagtccgactattgttctatattatatatggttgttgatggatctgtgatgcatgcgatagctgataatagaactcacgcaattattagcaaaaatatattagacaatactacgattaacgatgagtgtagatgctgttattttgaaccacagattaggattcttgatagagatgagatgctcaatggatcatcgtgtgatatgaacagacattgtattatgatgaatttacctgatgtaggcgaatttggatctagtatgttggggaaatatgaacctgacatgattaagattgctctttcggtggctggtaatttaataagaaatcgagactacattcccgggagacgaggatatagctactacgtttacggtatagcctctagataatttttttaagcacgaaataaaaaacataattttaaaccaatctatttcatactattttgtgtgatcaccatggacataaagatagatattagtatttctggtgataaatttacggtgactactaggagggaaaatgaagaaagaaaaaaatatctacctctccaaaaagaaaaaactactgatgttatcaaacctgattatcttgagtacgatgacttgttagatagagatgagatgtttactattctagaggaatattttatgtacagaggtctattaggcctcagaataaaatatggacgactctttaacgaaattaaaaaattcgacaatgatgcggaagaacaattcggtactatagaagaactcaagcagaaacttagattaaattctgaagagggagcagataactttatagattatataaaggtacaaaaacaggatatcgtcaaacttactgtatacgattgcatatctatgataggattgtgtgcatgcgtggtagatgtttggagaaatgagaaactgttttctagatggaaatattgtttacgagcgattaaactgtttattgatgatcacatgcttgataagataaaatctatactgcagaatagactagtatatgtggaaatgtcatagaaagttaaaagttaatgagagcaaaaatatataaggttgtattccatatttgttatttttttctgtaatagttagaaaaatacattcgatggtctatctatcagattattatgtgttataaggtactttttctcataataaactagagtatgagtaagatagtgtttttcaaaacatataaatctaaaattgatggatgagatatacagctattaatttcgaaaatatattttaatctgataactttaaacatggatttttaatggtggtttaacgttttaaaaaaagattttgttattgtagtatatgataatattaaaagatggatataaagaatttgctgactgcatgtactattttttacattactacattggctacggcagatatacctacttcgtcactgccacacgctccggtaaacggggcatgtgacgagggagaatatcttgataagaggcataatcaatgttgtaatcagtgtccacctggagaatttgccaaggttagatgtaatggtaacgataacacaaaatgtgaacgctgcccacctcatacatataccgcaatccccaattactctaatggatgtcatcaatgtagaaaatgcccaacaggatcatttgataaggtaaagtgtaccggaacacagaacagtaaatgttcgtgtcttcctggttggtattgcgctactgattcttcacagactgaagattgtcgagattgtataccaaaaaggagatgtccatgcggatactttggtggaatagatgaacaaggaaatcctatttgtaaatcgtgttgtgttggtgaatattgcgactacctacgtaattatagacttgatccatttcctccatgcaaactatctaaatgtaattaattatgattttgatgataatgttaccatacattatatcgctacttggttagtgtattattcagtatgaagacctattaataattacttatcttttgacgatcttgttataattataatataaaaatacttatggcatagtaactcataattgctgacgcgataaattcgtaataatctgttttgttcaaatttttataaggaatctacaggcataaaaataaaaatataatttataatatactcttacagcgcgccatcatgaataacagcagtgaattgattgctgttattaatggatttagaaatagtggacgattttgtgatattaatatagttattaatgatgaaaggataaacgctcacagactcatcctatctggagcctccgaatatttttccattctgttttccaataattttatcgattctaatgaatacgaagttaatctaagtcatttagattatcaaagtgttaacgatttgatcgattacatttatgggatacctttgagcctaactaacgataacgtgaaatatattctttcaaccgctgattttttacaaattggatctgctattacggagtgtgaaaattacatacttaaaaatctttgttctagaaactgtatcgatttctacatatacgctgataaatataataacaagaaaatagaatcagcgtcgtttaacacaatattacaaaatattttgagactcatcaacgatgaaaactttaaatacttaacagaggaatcaatgataaaaattttaagcgatgatatgttaaatataaaaaatgaggatttcgccccactaattctcattaaatggttagagagtactcaacaaccatgcaccgtcgagttacttaaatgcctcagaatatcattgctttccccacaagttataaaatcactttatagtcatcgactggttagttcaatctacgaatgtataacattcttaaacaatatagcattcttggatgaatcatttcctagataccatagcatcgagttgatatctatcggtataagtaattcgcatgataagatttccataaactgctacaatcataaaaaaaatacatgggaaatgatatcttcacgtagatataggtgtagtttcgcagtggccgtcctggataatattatctatatgatgggtggatatgatcagtccccgtatagaagttcaaaggttatagcgtacaatacatgtacaaattcttggatatatgatataccagagctaaaatatcctcgttctaattgtgggggactggctgatgacgaatacatttattgtataggcggcatacgcgatcaggattcatcgttgacatctagtattgatagatggaagccatcaaaaccatattggcagaagtatgctaaaatgcgcgaaccaaaatgtgatatgggggttgcgatgttaaacggattaatatatgttataggtggaatcgttaaaggtgacacgtgtaccgacgcactagagagtttatcagaagatggatggatgaagcatcaacgtcttccaataaaaatgtccaatatgtcgacgattgttcatgatggcaagatttatatatctggaggttacaacaatagtagtgtagttaatgtaatatcgaatctagtccttagctataattcgatatatgatgaatggaccaaattatcatcattaaacattcctagaattaatcccgctctatggtcagcgcataataaattatatgtaggaggaggaatatctgatgatgttcgaactaatacatctgagacatacgacaaagaaaaagattgttggacattggataatggtcacgtgttaccacgcaattatataatgtataaatgcgaaccgattaaacataaatatccattggaaaaaacacagtacacgaatgattttctaaagtatttggaaagttttataggtagttgatagaacaaaatacataattttgtaaaaataaatcactttttatactaatatgacacgattaccaatacttttgttactaatatcattagtatacgctacaccttttcctcagacatctaaaaaaataggtgatgatgcaactctatcatgtaatcgaaataatacaaatgactacgttgttatgagtgcttggtataaggagcccaattccattattcttttagctgctaaaagcgacgtcttgtattttgataattataccaaggataaaatatcttacgactctccatacgatgatctagttacaactatcacaattaaatcattgactgctagagatgccggtacttatgtatgtgcattctttatgacatcaactacaaatgacactgataaagtagattatgaagaatactccacagagttgattgtaaatacagatagtgaatcgactatagacataatactatctggatctacacattcaccggaaactagttctgagaaacctgattatatagataattctaattgctcgtcggtattcgaaatctaagctcaaaaattgaaaaactagcgtctttttttgctcgaagtcgaccaccatggtgggtgaggatagcgtgctgatcaccgagaacatgcacatgaaactgtacatggagggcaccgtgaacgaccaccacttcaagtgcacatccgagggcgaaggcaagccctacgagggcacccagaccatgaagatcaaggtggtcgagggcggccctctccccttcgccttcgacatcctggctaccagcttcatgtacggcagcaaaacctttatcaaccacacccagggcatccccgacttctttaagcagtccttccctgagggcttcacatgggagaggatcaccacatacgaagacgggggcgtgctgaccgctacccaggacaccagcctccagaacggctgcctcatctacaacgtcaagatcaacggggtgaacttcccatccaacggccctgtgatgcagaagaaaacactcggctgggaggccagcaccgagatgctgtaccccgctgacagcggcctgagaggccatagccagatggccctgaagctcgtgggcgggggctacctgcactgctccctcaagaccacatacagatccaagaaacccgctaagaacctcaagatgcccggcttctacttcgtggacaggagactggaaagaatcaaggaggccgacaaagagacctacgtcgagcagcacgagatggctgtggccaggtactgcgacctgcctagcaaactggggcacagctgattaattaatttttatcgatctaattcaacaatgtctggagagcttcgcaggatcccgactccggaaccaattactgataaagaagatcatacagttacagacactgtctcatacactacagtaagtacatcatctggaattgtcactactaaatcaaccaccgatgatgcggatctttatgatacgtacaatgataatgatacagtaccaccaactactgtaggcggtagtacaacctctattagcaattataaaaccaaggactttgtagaaatatttggtattaccgcattaattatattgtcggccgtggcaattttctgtattacatattatatatataataaacgttcacgtaaatacaaaacagagaacaaagtctagatttttgacttacataaatgtctgggatagtaaaatctatcatattgagcggaccatctggtttaggaaagacagccatagccaaaagactatgggaatatatttggatttgtggtgtcccataccactagatttcctcgtcctatggaacgagaaggtgttgattaccattacgttaacagagaggccatctggaagggaatagccgccggaaactttctagaacatactgagtttttaggaaatatttacggaacttctaaaacagctgtgaatacagcggctattaataatcgtatttgtgtgatggatctaaacatcgacggtgttagaagtcttaaaaatacgtacctaatgccttactcggtgtatataagacctacctctcttaaaatggttgagaccaagcttcgtcgtagaaacactgaagctaacgatgagattcatcgtcgtgtgatgttggcaaaaactgacatggatgaggcaggtgaagccggtctattcgacactattatcattgaagatgatgtgaatttagcatatagtaagttaattcagatactacaggaccgtattagaatgtattttaacactaattagagacttaagacttaaaacttgataattaataatataactcgtttttatatgtgtctatttcaacgtctaatgtattagttaaatattaaaacttaccacgtaaaacttaaaatttaaaatgatatttcattgacagatagatcacacattatgaactttcaaggacttgtgttaactgacaattgcaaaaatcaatgggtcgttggaccattaataggaaaaggtggattcggtagtatttatactactaatgacaataattatgtagtaaaaatagagcccaaagctaacggatcattatttaccgaacaggcattttatactagagtacttaaaccatccgttatcgaagaatggaaaaaatctcacaatataaagcacgtaggtcttatcacgtgcaaggcatttggtctatacaaatccattaatgtggaatatcgattcttggtaattaatagattaggtgcagatctagatgcggtgatcagagccaataataatagactaccaaaaaggtcggtgatgttgatcggaatcgaaatcttaaataccatacaatttatgcacgagcaaggatattctcacggagatattaaagcgagtaatatagtcttagatcaaatagataagaataaattatatctagtggattacggattggtttctaaattcatgtctaatggcgaacatgttccatttataagaaatccaaataaaatggataacggtactctagaatttacacctatagattcgcataaaggatacgttgtatctagacgtggagatctagaaacacttggatattgtatgattagatggttgggaggtatcttaccatggactaagatatctgaaacaaagaattgtgcattagtaagtgccacaaaacagaaatatgttaacaatactgcgactttgttaatgaccagtttgcaatatgcacctagagaattgctgcaatatattaccatggtaaactctttgacatattttgaggaacccaattacgacaagtttcggcacatattaatgcagggtgtatattattaagtgtggtgtttggtcgataaaaattaaaaaataacttaatttattattgatctcgtgtgtacaaccgaaatcatggcgatgttttacgcacacgctctcggtgggtacgacgagaatcttcatgcctttcctggaatatcatcgactgttgccaatgatgtcaggaaatattctgttgtgtcagtttataataacaagtatgacattgtaaaagacaaatatatgtggtgttacagtcaggtgaacaagagatatattggagcactgctgcctatgtttgagtgcaatgaatatctacaaattggaaatccgatccatgatcaagaaggaaatcaaatctctatcatcacatatcgccacaaaaactactatgctctaagcggaatcgggtacgagagtctagacttgtgtttggaaggagtagggattcatcatcacgtacttgaaacaggaaacgctgtatatggaaaagttcaacatgattattctactatcaaagagaaggccaaagaaatgagtgcacttagtccaggacctatcatcgattaccacgtctggataggagattgtatctgtcaagttactgctgtggacgtacatggaaaggaaattatgaaaatgagattcaaaaagggtgcggtgcttccgatcccaaatctggtaaaagttaaacttggggagaatgatacagaaaatctttcttctactatatcggcggcaccatcgaggtaaccacctctctggaagacagcgtgaatcatgtactcatgaaacgtttggaaactatacgccatatgtggtctgttgtatatgatcattttgatattgtgaatggtaaagaatgctgttatgtgcatacgcattcatctaatcaaaatcctataccgagtactgtaaaaacaaatttgtacatgaagactatgggatcatgcattcaaatggattccatggaagctctagagtatcttagcgaactgaaggaatcaggtggatggagtcccagaccagaaatgcaggaatttgaatatccagatggagtggaagacactgaatcaattgagagattggcagaggagttcttcaatagatcagaacttcaggctggtgaatcagtcaaatttggtaattctattaattgttaaacatacatctgtttcagctaagcaactaagaacacgtatacggcagcagcttccttctatactctcatcttttaccaacacaaagggtggatatttgttcattggagttgataataatacacacaaagtatttggattcacggtgggttacgactacctcagactgatagagaatgatatagaaaagcatatcaaaagacttcgtgttgtgcatttctgtgagaagaaagaggacatcaagtacgcgtgtcgattcatcaaggtatataaacctggggatgagactacctcgacatacgtgtgcgctatcaaagtggaaagatgctgttgtgctgtgtttgcagattggccagaatcatggtatatggatactaatggtatcaagaagtattctccagatgaatgggtgtcacatataaaattttaattaatgtaactatagagaacaaataataaggttgtaatatcatatagacaataactaacaattaattagtaactgttatctcttttttaactaaccaactaactatatacctattaatacatcgtaattatagttcttaacatctattaatcattaattcgcttctttaattttttataaactaacattgttaattgaaaagggataacatgttacagaatataaattatatatggatttttttaaaaaggaaatacttgactggagtatatatttatctcttcattatatagcacgcgtgttttccaatttttccacatcccatataatacaggattataatctcgttcgaacatacgagaaagtggataaaacaatagttgattttttatctaggttgccaaatttattccatattttagaatatggggaaaatattctacatatttattctatggatgatgctaatacgaatattataattttttttctagatagagtattaaatattaataagaacgggtcatttatacacaatctcgggttatcatcatccattaatataaaagaatatgtatatcaattagttaataatgatcatccagataataggataagactaatgcttgaaaatggacgtagaacaagacattttttgtcctatatatcagatacagttaatatctatatatgtattttaataaatcatggattttatatagatgccgaagacagttacggttgtacattattacatagatgtatatatcactataagaaatcagaatcagaatcatacaatgaattaattaagatattgttaaataatggatcagatgtagataaaaaagatacgtacggaaacacaccttttatcctattatgtaaacacgatatcaacaacgtggaattgtttgagatatgtttagagaatgctaatatagactctgtagactttaatagatatacacctcttcattatgtctcatgtcgtaataaatatgattttgtaaagttattaatttctaaaggagcaaatgttaatgcgcgtaataaattcggaactactccattttattgtggaattatacacggtatctcgcttataaaactatatttggaatcagacacagagttagaaatagataatgaacatatagttcgtcatttaataatttttgatgctgttgaatctttagattatctattatccagaggagttattgatattaactatcgtactatatacaacgaaacatctatttacgacgctgtcagttataatgcgtataatacgttggtctatctattaaacaaaaatggtgattttgagacgattactactagtggatgtacatgtatttcggaagcagtcgcaaacaacaacaaaataataatggaagtactattgtctaaacgaccatctttgaaaattatgatacagtctatgatagcaattactaaacataaacagcataatgcagatttattgaaaatgtgtataaaatatactgcgtgtatgaccgattatgatactcttatagatgtacagtcgctacagcaatataaatggtatattttaagatgtttcgatgaaatagatatcatgaagagatgttatataaaaaataaaactgtattccaattagttttttgtatcaaagacattaatactttaatgagatacggtaaacatccttctttcgtgaaatgcactagtctcgacgtatacggaagtcgtgtacgtaatatcatagcatctattagatatcgtcagagattaattagtctattatccaagaagctggatcctggagataaatggtcgtgttttcctaacgaaataaaatataaaatattggaaaactttaacgataacgaactatccacatatctaaaaatcttataaacattattaaaatataaaatctaagtaggataaaatcacactacatcattgtttccttttagtgctcgacagtgtatactatttttaacgctcataaataaaaatgaaaacgatttccgttgttacgttgttatgcgtactacctgctgttgtttattcaacatgtactgtacccactatgaataacgctaaattaacgtctaccgaaacatcgtttaatgataaccagaaagttacgtttacatgtgatcagggatatcattctttggatccaaatgctgtctgtgaaacagataaatggaaatacgaaaatccatgcaaaaaaatgtgcacagtttctgattatgtctctgaactatataataaaccgctatacgaagtgaattccaccatgacactaagttgcaacggcgaaacaaaatattttcgttgcgaagaaaaaaatggaaatacttcttggaatgatactgttacgtgtcctaatgcggaatgtcaacctcttcaattagaacacggatcgtgtcaaccagttaaagaaaaatactcatttggggaatatatgactatcaactgtgatgttggatatgaggttattggtgcttcgtacataagttgtacagctaattcttggaatgttattccatcatgtcaacaaaaatgtgatatgccgtctctatctaacggattaatttccggatctacattttctatcggtggcgttatacatcttagttgtaaaagtggttttacactaacggggtctccatcatccacatgtatcgacggtaaatggaatcccatactcccaatatgtgtacgaactaacgaaaaatttgatccagtggatgatggtcccgacgatgagacagatttgagcaaactctcgaaagacgttgtacaatatgaacaagaaatagaatcgttagaagcaacttatcatataatcatagtggcgttgacaattatgggcgtcatatttttaatctccgttatagtattagtttgttcctgtgacaaaaataatgaccaatataagttccataaattgctaccgtaaatataaatccgttaaaataattaataatttaataacaaacaagtatcaaaagattaaagacttatagctagaatcaattgagatgtcttcttcagtggatgttgatatctacgatgccgttagagcatttttactcaggcactattataacaagagatttattgtgtatggaagaagtaacgccatattacataatatatacaggctatttacaagatgcgccgttataccgttcgatgatatagtacgtactatgccaaatgaatcacgtgttaaacaatgggtgatggatacacttaatggtataatgatgaatgaacgcgatgtttctgtaagcgttggcaccggaatactattcatggaaatgtttttcgattacaataaaaatagtatcaacaatcaactaatgtatgatataattaatagcgtatctataattctagctaatgagagatatagaagcgcttttaacgacgatggtatatacatccgtagaaatatgattaacaagttgtacggatacgcatctctaactactattggcacgatcgctggaggtgtttgttattatctgttgatgcatctagttagtttgtataaataattatttcaatatactagttaaaattttaagattttaaatgtataaaaaactaataacgtttttatttgtaataggtgcattagcatcctattcgaataatgagtacactccgtttaataaactgagtgtaaaactctatatagatggagtagataatatagaaaattcatatactgatgataataatgaattggtgttaaattttaaagagtacacaatttctattattacagagtcatgcgacgtcggatttgattccatagatatagatgttataaacgactataaaattattgatatgtataccattgactcgtctactattcaacgcagaggtcacacgtgtagaatatctaccaaattatcatgccattatgataagtacccttatattcacaaatatgatggtgatgagcgacaatattctattactgcagagggaaaatgctataaaggaataaaatatgaaataagtatgatcaacgatgatactctattgagaaaacatactcttaaaattggatctacttatatatttgatcgtcatggacatagtaatacatattattcaaaatatgatttttaaaaatttaaaatatattatcacttcagtgacagtagtcaaataacaaacaacaccatgagatatattataattctcgcagttttgttcattaatagtatacatgctaaaataactagttataagtttgaatccgtcaattttgattccaaaattgaatggactggggatggtctatacaatatatcccttaaaaattatggcatcaagacgtggcaaacaatgtatacaaatgtaccagaaggaacatacgacatatccgcatttccaaagaatgatttcgtatctttctgggttaaatttgaacaaggcgattataaagtggaagagtattgtacgggactatgcgtcgaagtaaaaattggaccaccgactgtaacattgactgaatacgacgaccatatcaatttgtacatcgagcatccgtatgctactagaggtagcaaaaagattcctatttacaaacgcggtgacatgtgtgatatctacttgttgtatacggctaacttcacattcggagattctaaagaaccagtaccatatgatatcgatgactacgattgcacgtctacaggttgcagcatagactttgtcacaacagaaaaagtgtgcgtgacagcacagggagccacagaagggtttctcgaaaaaattactccatggagttcgaaagtatgtctgacacctaaaaagagtgtatatacatgcgcaattagatccaaagaagatgttcccaatttcaaggacaaaatggccagagttatcaagagaaaatttaatacacagtctcaatcttatttaactaaatttctcggtagcacatcaaatgatgttaccacttttcttagcatgcttaacttgactaaatattcataactaatttttattaatgatacaaaaacgaaataaaactgcatattatacactggttaacgcccttataggctctaaccattttcaagatgaggtccctgattatagtccttctgttcccctctatcatctactccatgtctattagacgatgtgagaagactgaagaggaaacatggggattgaaaatagggttgtgtataattgccaaagatttctatcccgaaagaactgattgcagtgttcatctcccaactgcaagtgaaggattgataactgaaggcaatggattcagggatatacgaaacaccgataaattataaaaaaagcaatgtgtccgctgtttccgttaataatactattttcgtaactggcggattattcataaataactctaatagcacgatcgtggttaacaatatggaaaaacttgacatttataaagacaaacaatggtcgattatagaaatgcctatggctagggtatatcacggcattgactcgacatttggaatgttatattttgccggaggtctatccgttaccgaacaatatggtaatttagagaaaaacaacgagatatcttgttacaatcctagaacgaataagtggtttgatatttcatatactatttataagatatccatatcatcattgtgtaaactaaataacgtcttctatgtatttagtaaggacattggatatgtggaaaagtatgatggtgcatggaagttagtacatgatcgtctccccgctataaaggcattatcaacttctccttattgattgaaaatgaaaatataaatagtttttatgtatagcagtattaccctatagttttattgcttactactaacatggatacagatgttacaaatgtagaagatatcataaatgaaatagatagagagaaagaagaaatactaaaaaatgtagaaattgaaaataataaaaacattaacaagaatcatcccaatgaatatattagagaagcactcgttattaataccagtagtaatagtgattccattgataaagaagttatagaatgtatcagtcacgatgtaggaatatagatcatatctactaatttttataatcgatacaaaacataaaaaacaactcgttattacatagcaggcatggaatccttcaagtattgttttgataacgatggcaagaaatggattatcggaaatactttatattctggtaattcaatactctataaggtcagaaaaaatttcactagttcgttctacaattacgtaatgaagatagatcacaaatcacacaagccattgttgtctgaaatacgattctatatatctgtattggatcctttgactatcgacaactggacacgggaacgtggtataaagtatttggctattccagatctgtatggaattggagaaaccgatgattatatgttcttcgttataaagaattcgggaagagtattcgccccaaaggatactgaatcagtcttcgaagcatgcgtcactatgataaacacgttagagtttatacactctcgaggatttacccatggaaaaatagaaccgaggaatatactgattagaaataaacgtctttcactaattgactattctagaactaacaaactatacaagagtggaaactcacatatagattacaacgaggacatgataacttcaggaaatatcaattatatgtgtgtagacaatcatcttggagcaacagtttcaagacgaggagatttagaaatgttgggatattgcatgatagaatggttcggtggcaaacttccatggaaaaacgaaagtagtataaaagtaataaaacaaaaaaaagaatataaaaaatttatagctactttctttgaggactgttttcctgaaggaaatgaacctctggaattagttagatatatagaattagtatacacgttagattattctcaaactcctaattatgacagactacgtaaactgtttatacaagattgaaattatattcttttttttatagagtgtggtagtgttacggatatctaatattaatattagactatctctatcgcgctacacgaccaatatcgattactatggatatcttctatgaaaggagagaatgtatttatttctccagcgtcaatctcgtcagtattgacaatactgtattatggagctaatggatccactgctgaacagctatcaaaatatgtagaaacggaggagaacacggataaggttagcgctcagaatatctcattcaaatccatgaataaagtatatgggcgatattctgccgtgtttaaagattcctttttgagaaaaattggcgataagtttcaaactgttgacttcactgattgtcgcactatagatgcaatcaacaagtgtgtagatatctttactgaggggaaaatcaatccactattggatgaaccattgtctcctagcaattagtgccgtatactttaaagcaaaatggttgacgccattcgaaaaggaatttaccagtgattatcccttttacgtatctccgacggaaatggtagacgtaagtatgatgtctatgtacggcaaggcatttaatcacgcatctgtaaaagaatcattcggcaacttttcaatcatagaactgccatatgttggagatactagtatgatggtcattcttccagacaagattgatggattagaatccatagaacaaaatctaacagatacaaattttaagaaatggtgtgactttatggatgctatgtttatagatgttcacattcccaagtttaaggtaacaggctcgtataatctggtggatactctagtaaagtcaggactgacagaggtgttcggttcaactggagattatagcaatatgtgtaatttagatgtgagtgtcgacgctatgatccacaaaacgtatatagatgtcaatgaagagtatacagaagcagctgcagcaacttctgtactagtggcagactgtgcatcaacaattacaaatgagttctgtgcagatcatccgttcatctatgtgattaggcatgttgatggaaaaattcttttcgttggtagatattgctctccgacaactaattgttaaccattttttttaaaaaaaatagaaaaaacatgtggtattagtgcaggtcgttgttcttccaattgcaattggtaagatgacggccaactttagtacccacgtcttttcaccacagcactgtggatgtgacagactgaccagtattgatgacgtcaaacaatgtttgactgaatatatttattggtcgtcctatgcataccgcaacaggcaatgcgctggacaattgtattccacactcctctcttttagagatgatgcggaattagtgttcatcgacattcgcgagctggtaaaaaatatgccgtgggatgatgtcaaagattgtacagaaatcatccgttgttatataccggatgagcaaaaaaccatcagagagatttcggccatcatcggactttgtgcatatgctgctacttactggggaggtgaagaccatcccactagtaacagtctgaacgcattgtttgtgatgcttgagatgctaaattacgtggattataacatcatattccggcgtatgaattgatgagttgtacatcttgacattttctttcttctcttctccctttcttctcttctcccttcctccctcttctccctttcccagaaacaaacttttttacccactataaaataaaatgagtatactacctattatatttcttcctatatttttttattcttcattcgttcagacttttaacgcgtctgaatgtatcgacaaagggcaatattttgcatcattcatggagttagaaaacgagccagtaatcttaccatgtcctcaaataaatacgctatcatccggatataatatattagatattttatgggaaaaacgaggagcggataatgatagaattataccgatagataatggtagcaatatgctaattctgaacccgacacaatcagactctggtatttatatatgcattaccacgaacgaaacctactgtgacatgatgtcgttaaatttgacaatcgtgtctgtctcagaatcaaatatagatcttatctcgtatccacaaatagtaaatgagagatctactggcgaaatggtatgtcccaatattaatgcatttattgctagtaacgtaaacgcagatattatatggagcggacatcgacgccttagaaataagagacttaaacaacggacacctggaattattaccatagaagatgttagaaaaaatgatgctggttattatacatgtgttttagaatatatatacggtggcaaaacatataacgtaaccagaattgtaaaattagaggtacgggatagaataataccttctactatgcaattaccagatggcattgtaacttcaataggtagtaatttgactattgcatgcagagtatcgttgagacctcccacaacggacaccgacgtcttttggataagtaatggtatgtattacgaagaagatgatggggacggaaacggtagaataagtgtagcaaataaaatctatatgaccgataagagacgtgttattacatcccggttaaacattaatcctgtcaaggaagaagatgctacaacgtttacgtgtatggcgtttactattcctagcatcagcaaaacagttactgttagtataacgtgaatgtatgttgttacatttccatgtcaattgagtttataagaatttttatacattatcttccaacaaacaattgacgaacgtattgctatgattaactcccacgatactatgcatattattaatcattaacttgcagactatacctagtgctattttgacatactcgtgttcttgtgtaattgcggtatctatattattaaagtacgtaaatctagctatagttttattatttaattttagataatataccgtctccttatttttaaaaattgccacatcctttattaaatcatgaatgggaatttctatgtcatcgttagtatattgtgaacaacaagagcagatatctataggaaagggtggaatgcgatacattgatctatgtagttttaaaacacacgcgaactttgaagaatttatataaatcattccatcgatacatccttctatgttgacatgtatatatccaggaattcttttattaatgtcaggaaatgtataaactaaaacattgcccgaaagcggtgcctctatctgcgttatatccgttcttaacttacaaaatgtaaccaatacctttgcatgacttgttttgttcggcaacgttagtttaaacttgacgaatggattaattacaatagcatgatccgcgcatctattaagtttttttactttaacgcccttgtatgtttttacagagactttatctaaatttctagtgcttgtatgtgttataaatataacgggatatagaaccgaatcacctaccttagatacccaattacattttatcagatccagataataaacaaattttgtcgccctaactaattctatattgttatatattttacaattggttatgatatcatgtaataacttggagtctaacgcgcatcgtcgtacgtttatacaattgtgatttagtgtagtatatctacacatgtatttttccgcactatagtattctggactagtgataaaactatcgttatatctgtcttcaatgaactcatcgagatattgctctctgtcatattcatacacctgcataaactttctagacatcttacaatccgtgttattttaggatcatatttacatatttacgggtatatcaaagatgttagattagttaatgggaatcgtctataataatgaatattaaacaattatatgaggacttttaccacaaagcatcataaaaatgagtcgtcgtctgatttatgttttaaatatcaaccgcaaatcaactcataaaatacaagagaatgaaatatatacatattttagtcattgcaatatagaccatacttctacagaacttgattttgtagttaaaaactatgatctaaacagacgacaacctgtaactgggtatactgcactacactgctatttgtataataattactttacaaacgatgtactgaagatattattaaatcatgacgtaaatgtaacgatgaaaaccagtagcggacgtatgcctgtttatatattgcttactagatgttgtaatatttcacatgatgtagtgatagatatgatagacaaagataaaaaccacttattacatagagactattccaacctattactagagtatataaaatctcgttacatgttattgaaggaagaggatatcgatgagaacatagtatccactttattagataagggaatcgatcctaactttaaacaagacggatatacagcgttacattattattatttgtgtctcgcacacgtttataaactaggtgagtgtagaaaaccgataacgataaaaaaggccaagcgaattatttctttgtttatacaacatggagctaatctaaacgcgttagataattgtggtaatacaccattccatttgtatcttagtattgaaatgtgtaataatattcatatgactaaaatgctgttgacttttaatccgaatttcaaaatatgtaataatcatggattaacgcctatactatgttatataacttccgactacatacaacacgatattcttgttatgttaatacatcactatgaaacaaatgttggagaaatgccgatagatgagcgtcgtatgatcgtattcgagtttatcaaaacatattctacacgtccggcagattcgataacttatttgatgaataggtttaaaaatataaatatttatacccgctatgaaggaaagacattattacacgtagcatgtgaatataataatacacaagtaatagattatcttatacgtatcaacggagatataaatgcgttaaccgacaataacaaacacgctacacaactcattatagataacaaagaaaattccccatataccattaattgtttactgtatatacttagatatattgtagataagaatgtgataagatcgttggtggatcaacttccatctctacctatcttcgatataaaatcatttgagaaattcatatcctactgtatacttttagatgacacattttacgataggcacgttaagaatcgcgattctaaaacgtatcgatacgcattttcaaaatacatgtcgtttgataaatacgatggtataataactaaatgtcacgacgaaacaatgttactcaaactgtccactgttctagacactacactatatgcagttttaagatgtcataattcgagaaagttaagaagatacctcaacgagttaaaaaaatataataacgataagtcctttaaaatatattctaatattatgaatgagagataccttaatgtatattataaagatatgtacgtgtcaaaggtatatgataaactatttcctgttttcacagataaaaattgtctactaacattactaccttcagaaattatatacgaaatattatacatgctgacaattaacgatctttataatatatcgtatccacctaccaaagtatagttgtatttttctcatgcgatgtgtgtaaaaaaactgatattatataaatattttagtgccgtataataaagatgacgatgaaaatgatggtacatatatatttcgtatcattattgttattgctattccacagttacgccatagacatcgaaaatgaaatcacagaattcttcaataaaatgagagatactctaccagctaaagactctaaatggttgaatccagcatgtatgttcggaggcacaatgaatgatatagccgctctaggagagccattcagcgcaaagtgtcctcctattgaagacagtcttttatcgcacagatataaagactatgtggttaaatgggagaggctagaaaagaatagacggcgacaggtttctaataaacgtgttaaacatggtgatttatggatagccaactatacatctaaattcagtaaccgtaggtatttgtgcaccgtaactacaaagaatggtgactgtgttcagggtatagttagatctcatattaaaaaacctccttcatgcattccaaaaacatatgaactaggtactcatgataagtatggcatagacttatactgtggaattctttacgcaaaacattataataatataacttggtataaagataataaggaaattaatatcgacgacattaagtattcacaaacgggaaaggaattaattattcataatccagagttagaagatagcggaagatacgactgttacgttcattacgacgacgttagaatcaagaatgatatcgtagtatcaagatgtaaaatacttacggttataccgtcacaagaccacaggtttaaactaatactagatccgaaaatcaacgtaacgataggagaacctgccaatataacatgcactgctgtgtcaacgtcattattgatcgacgatgtactgattgaatgggaaaatccatccggatggcttataggattcgattttgatgtatactctgttttaactagtagaggcggtatcaccgaggcgaccttgtactttgaaaatgttactgaagaatatataggtaatacatataaatgtcgtggacacaactattattttgaaaaaacccttacaactacagtagtattggagtaaatatacaatgcatttttatatacattactgaattattattactgaattattattactgaattattattaattatatcgtatttgtgctatagaatggatgaagatacgcgactatctaggtatttgtatctcaccgatagagaacatataaatgtagactctattaaacagttgtgtaaaatatcagatcctaatgcatgttatagatgtggatgtacggctttacatgagtacttttataattatagatcagtcaacggaaaatacaagtatagatacaacggttactatcaatattattcatctagcgattatgaaaattataatgaatattattatgatagaactggtatgaacagtgagagtgataatatatcaatcaaaacagaatatgaattctatgatgaaacacaagatcaaagtacacaactagtaggttacgacattaaactcaaaaccaatgaggatgattttatggctatgatagatcagtgggtgtccatgattatatagatgaatcaattaataaagtagtatatggaagagagtctcacgtaagatggcgggatatatggcaagaacataatgatggcgtatacagtataggaaaggagtgcatagataatatatacgaagacaaccataccgtagacgaattctacaagatagacagcgtatcagatgtagatgacgcggaacacatatctccgataactaaaaaaccatagaatcagttgatgataatacctacatttctaatcttccgtataccatcaaatacaaaatattcgagcaacaataagtattttttatacctttaaaactgataaataaattttttctagtgatattttggcaagatgagaatcctatttctcatcgctttcatgtatgggtgtgttcactcatatgttaacgcggttgaaaccaaatgtccaaatctagacattgtaacatcttctggagaatttcattgttcaggatgtgtggaacatatgcctgagtttagctatatgtattggttggcaaaggatatgaaatcggacgaggataccaagtttatagaacatctgggtgatggcatcaaagaagatgaaaccgttcgtaccacagatagtggaatcgtcactctacgtaaagtccttcatgtgactgatactaataaatttgataattataggttcacttgtgtcctcgctacgctagatggcatttataaaaagaatgtttgctgaagtagttgtgtgctactatttttatttatgatataatctaatggaattaatttgaattgatatttatccaatactaaagattatattagaatcaaattaatcttttatacgagaaaaaataacgacatacgtcgtcaacaaattaaactttttatttattagttaactagcttatagaacttgctcattgttatgtttctaaaacgggtacggcatataggacaattatccgacgcaccggtttctcttcgtgttctatgccatatattgatgcatgttatgcaaaatatatgagtacacgaatccaataaaccaaagtatctatcgttttgagtaaacaacttcatagcaaattccacattctttttctttacttactctatacacgtcctcgtatttatttagtattttgatgatatccaactcagaaatggttgttgtattattgggtgtatttggagtataggtattattagctatgtaccaatttaccaaccctcttaatattgattgataatcacatcggttatccaattaataactaaattgtagtgtatatatagaccatatatgtttctatttttttgacagttacgtatagtttcagtaagttttgattgttgtattcctgtatctctagataagttagtcatatagtcccttccggcgatacgttttttccaagcccgaaattgattagccaaatgtgtatttatttttgtgatattgatataatatttcggataatgcatactgttagtcttatatcatttggttcatctatgtattgtaatattgttacatgatctatagatgatgtattgattttggcaggatcgaattccatatccgcgactaaacagtgaaaaaaatgtaaatactttttaaattttaaattagtaaaacttttttttattttttatgattccaaaaatactgaatacaaagtcctaaattataaatatggagatcatactaccacaacttattattatgtatacaaggccggtgtaatagatagatatatataattctattacaccggcagacaattaccgaccggtatttgtcgttaccaacataccgtataatatgtaatatacaattccataacccattgacagttgttatacatcaaaattgcaattcttttgattacgatgttataagaatgtagttaattgatgtatgatgttaatgtgtcctctttcctcttataacatcgtaatcaaaaacttttttataatatatacctaataatgtgtcttaatagttctcgtgattcgtcaaacaatcattcttataaaatataataaagcaacgtaaaaacacataaaaataagcgtaactaataagacaatggatatttacgacgataaaggtctacagactattaaactgtttaataatgaatttgattgtataaggaatgacatcagagaattatttaaacatgtaactgattccgatagtatacaacttccgatggaagacaattctgatattatagaaaatatcagaaaaatactatatagacgattaaaaaatgtagaatgtgttgacatcgataacacaataacttttatgaaatacgatccaaatgatgataataagcgtacgtgttctaattgggtacccttaactaataactatatggaatattgtctagtaatatatttggaaacaccgatatgtggaggcaaaataaaattataccaccctacaggaaatataaagtcggataaggatattatgtttgcaaagactctagactttaaatcaacgaaagtgttaactggacgtaaaacaattgccgttctagacatatccgtttcatataatagatcaatgactactattcactacaacgacgacgttgatatagatatacatactgataaaaatggaaaagagttatgttattgttatataacaatagatgatcattacttggttgatgtggaaactataggagttatagtcaatagatctggaaaatgtctgttagtaaataaccatctaggtataggtatcgttaaagataaacgtataagcgatagttttggagatgtatgtatggatacaatatttgacttttctgaagcacgagagttattttcattaactaatgatgataacaggaatatagcatgggacactgataaactagacgatgatacagatatatggactcccgtcacagaagatgattacaaatttctttctagactagtattgtatgcaaaatctcaatcggatactgtatttgactattatgttcttactggtgatacggaaccacccactgtattcattttcaaggtaactagattttactttaatatgccgaaataaaaaatttttgtataatatctagaggtagaggtattgtttagataaatacaaataacatagatacatcgcatacttagcatttttataaatatacataagacatacactttatacatttttgtaaaaatactcataaaaaaatttataaaaattatggcacaaccatatcttgtataggtagtttagttcgtcgagtgaacctataaacagataatagacaacacataataatgcctactaatacaagcataataccgggagatgggatatatgacgttgtagtgtttgggttttctgaacgttgatagtctactaatactacatgctgacatctaatgcctgtataaccatgagagcatctacaatacataccgtcaatatctctagcgtggatacagtcaccgtgtaaacaatatccatctccctctggaccgcataatctgatagctggaatatctgttgtagcgtttgtaatttctggcaatgtcgtttcgatagcgttaccactatcggcgaatgatctgattatcatagcagcgaacaacaacatcagataatttatcaacatttttgatggattctgtgtttatgctgtttctcagtgtgtgtttatgacaagattgggaattttatattattaattcagtaatataaactaataatatattgttaattgtgtaaataatataaaaataacaatacaatattgaatgtgttgctgttaaaaatgtatgtgttaatataatagaataaaataaatgagtatgatcattttagataacgattgattttatcattaccgcttcattcttatattctttgcttacggaacctatatttagaaacatctactaacaattttttatgcttgcattattaatggtatgtaatatgattgattgtgtacgcaataccaatttgttaagtatgaatacggggtacaaacataaattgaaatttaacattatttatttatgatatatatcgttatcgttaggtctataccatggatatctttaaagaactaatcttaaaacaccctgatgaaaatgttttgatttctccagtttccattttatctactttatctattctaaatcatggagcagctggttctacagctgaacaactatcaaaatatatagagaatatgaatgagaatacacccgatgacaataatgatgacatggaggtagatattccgtattgtgcgacactagctaccgcaaataaaatatacggtagcgatagtatcgagttccacgcctccttcctacaaaaaataaaagacgattttcaaactgtaaactttaataatgctaaccaaacaaaggaactaatcaacgaatgggttaagacaatgacaaatggtaaaattaattccttattgactagtccgctatccattaatactcgtatgacagttgttagcgccgtccattttaaagcaatgtggaaatatccattttctaaacatcttacatatacagacaagttttatatttctaagaatatagttaccagcgttgatatgatggtgggtaccgagaataacttgcaatatgtacatattaatgaattattcggaggattctctattatcgatattccatacgagggaaactctagtatggtaattatactaccggacgacatagaaggtatatataacatagaaaaaaatataacagatgaaaaatttaaaaaatggtgtggtatgttatctactaaaagtatagacttgtatatgccaaagtttaaagtggaaatgacagaaccgtataatctggtaccgattttagaaaatttaggacttactaatatattcggatattatgcagattttagcaagatgtgtaatgaaactatcactgtagaaaaatttctacatacgacgtttatagatgttaatgaggagtatacagaagcatcggccgttacaggagtatttacgattaacttttcgatggtatatcgtacgaaggtctacataaaccatccattcatgtacatgattaaagacaccacaggacgtatactttttatagggaaatactgctatccgcaataaatataaacaaatagacttttataaagagtcttcaacgataagtatatcgacatactacttatgctgcgaaagattctgaacgagaacgactatctcaccctcttggatcatatccgcactgctaaatactaaatctccactacactttttatcatcttatgaggaatgattgccttcgtgaaataggaataattagcaccagaatagctatggattattgtggtagagagtgcactattctatgtcgtctactggatgaagatgtgacgtacaaaaaaataaaactagaaattgaaacgtgtcacaacttatcaaaacatatagatagacgaggaaacaatgcgctacattgttacgtctccaataaatgcgatacagacattaagattgttctctcgcggagtcgagagactttgtagaaacaacgaaggattaactccgctaggagtatacagtaagcatagatacgtaaaatctcagattgtgcatctactgatatccagctattcaaattcctctaacgaactcaagtcgaatataaatgatttcgatctgtattcggataatatcgacttacgtctgctaaaatacctaattgtggataaacggatacgtccgtccaagaatacgaattatgcaatcaatggtctcggattggtggatatatacgtaacgacgcctaatccgagaccagaagtattgctatggcttcttaaatcagaatgttacagcaccggttacgtatttcgtacctgtatgtacgacagtgatatgtgtaagaactctcttcattactatatatcgtctcatagagaatctcaatctctatccaaggatgtaattaaatgtttgatcgataacaatgtttccatccatggcagagacgaaggaggatctttacccatccaatactactggtctttctcaaccatagatatagagattgttaaattattattaataaaggatgtggacacgtgtagagtatacgacgtcagccctatattagaggcgtattatctaaacaagcgatttagagtaaccccatataatgtagacatggaaatcgttaatcttcttattgagagacgtcatactcttgtcgacgtaatgcgtagtattacttcgtacgattccagagaatataaccactacatcatcgataacattctaaagagatttagacaacaggatgaatccatcgtacaagccatactgataaactacttacattacggcgatatggtcgttcgatgcatgttagataacggacaacaactatcctctacacgactactttgttaataataatctcgtcgatgtaaacgtcgtaaggtttatcgtggaaaatatggacacgcggctgtaaatcacgtatcgaacaatggccgtctatgtatgtacggtctgatattatcgagatttaataattgcgggtatcactgttatgaaaccatactgatagatgtatttgatatactaagcaagtacatggatgatatagatatgatcgataactctactatattacgcggtcgatgtcaataatatacaatttgcaaagcggttattggaatatggagcgagtatcacgctcgataatcaatacggccatccagaaaagcagttacagaagagaaaacaaaacgaaatcgttgttctacaagatgtctctccctacgacgattactacgtaaaaaagatactagcctactgcctattaagggacgagtcattcgcggaactacatagtaaattctgtttaaacgaggactataaaagtgtatttatgaaaaatatatcattcgataagatagattccatcatcgtgacataagtcgcctcaaagagattcgaatctccgacaccgacctgtatacggtatcacagctatcttaaagccatacattcagacagtcacatttcatttcccatgtacgacgatctcatagaacagtgccatctatcgatggagcgtaaaagtaaactcgtcgacaaagcactcaataaattagagtctaccatcggtcaatctagactatcgtatttgcctccggaaattatgcgcaatatcatctaaacagtatgttgtacggaaagaaccattacaaatattatccatgatagaaagaaaatatctatatgattggagaagtaggaaacaggaacaagacaacgattactacattattaaatcatgaagtccgtattatactcgtatatattgtttctctcatgtataataataaacggaagagatatagcaccgcatgcaccatccgatggaaagtgtaaagacaacgaatacaaacgccataatttgtgtccgggaacatacgcttccagattatgcgatagcaagactaacacacgatgtacgccgtgtggttcgggtaccttcacatctcgcaataatcatttacccgcttgtctaagttgtaacggaagacgcgatcgtgtaacacgactcacaatagaatctgtgaatgctctcccggatattattgtcttctcaaaggatcatccggatgcaaggcatgtgtttcccaaacaaaatgtggaataggatacggagtatccggagacgtcatctgttctccgtgtggtctcggaacatattctcacaccgtctcttccgcagataaatgcgaacccgtacccagaaatacgtttaactatatcgatgtggaaattaacctgtatccagttaacgacacgtcgtgtactcggacgaccactaccggtctcagcgaatccatctcaacgtcggaactaactattactatgaatcataaagactgtaatcccgtatttcgtgatggatacttctccgttcttaataaggtagcgacttcaggtttctttacaggagaaaggtgtgcactctgaatttcgagattaaatgcaataacaaagattcttcctccaaacagttaacgaaagcaaagaatgatactatcatgccgcattcggagacagtaactctagtgggcgacatctatatactatatagtaataccaatactcaagactacgaaactgatacaatctcttatcatgtgggtaatgttctcgatgtcgatagccatatgcccggtagttgcgatatacataaactgatcactaattccaaacccacccactttttatagtaagtttttcacccataaataataaatacaataattaatttctcgtaaaagtagaaaatatattctaatttattgcacggtaaggaagtagaatcataaagaacagtactcaatcaatagcaattatgaaacaatatatcgtcctggcatgcatgtgcctggcggcagctgctatgcctgccagtcttcagcaatcatcctcatcctcctcctcgtgtacggaagaagaaaacaaacatcatatgggaatcgatgttattatcaaagtcacaaagcaagaccaaacaccgaccaatgataagatttgccaatccgtaacggaaattacagagtccgagtcagatccagatcccgaggtggaatcagaagatgattccacatcagtcgaggatgtagatcctcctaccacttattactccatcatcggtggaggtctgagaatgaactttggattcaccaaatgtcctcagattaaatccatctcagaatccgctgatggaaacacagtgaatgctagattgtccagcgtgtccccaggacaaggtaaggactctcccgcgatcactcatgaagaagctcttgctatgatcaaagactgtgaagtgtctatcgacatcagatgtagcgaagaagagaaagacagcgacatcaagacccatccagtactcgggtctaacatctctcataagaaagtgagttacgaagatatcatcggttcaacgatcgtcgatacaaaatgcgtcaagaatctagagtttagcgttcgtatcggagacatgtgcaaggaatcatctgaacttgaggtcaaggatggattcaagtatgtcgacggatcggcatctgaaggtgcaaccgatgatacttcactcatcgattcaacaaaactcaaagcgtgtgtctgaatcgataactctattcatctgaaattggatgagtagggttaatcgaacgattcaggcacaccacgaattaaaaaagtgtaccggacactatattccggtttgcaaaacaaaaatgttcttaactacattcacaaaaagttacctctcgcgacttcttctttttctgtctcaatagtgtgatacgattatgacactattcctattcctattcctatttcctttcagagtatcacaaaaatattaaacctctttctgatggtctcataaaaaaagttttacaaaaatatttttattctctttctctctttgatggtctcataaaaaaagttttacaaaaatatttttattctctttctctctttgatggtctcataaaaaaagttttacaaaaatatttttattctctttctctctttgatggtctcataaaaaaagttttacaaaaatatttttattctctttctctctttgatggtctcataaaaaaagttttacaaaaatatttttattctctttctctctttgatggtctcataaaaaaagttttacaaaaatatttttattctctttctctctttgatggtctcataaaaaaagttttacaaaaatatttttattctctttctctctttgatggtctcataaaaaaagttttacaaaaatatttttattctctttctctctttgatggtctcataaaaaaagttttacaaaaatatttttattctctttctctctttgatggtctcataaaaaaagttttacaaaaatatttttattctctttctctctttgatggtctcataaaaaaagttttacaaaaatatttttattctctttctctctttgatggtctcataaaaaaagttttacaaaaatatttttattctctttctctctttgatggtctcataaaaaagttttacaaaaatatttttattctctttctctctttgatggtctcataaaaaagttttacaaaaatatttttattctctttctctctttgatggtctcataaaaaaagttttacaaaaatatttttattctctttctctctttgatggtctcataa

SEQ ID NO: 16 - DNA, 201471 bp, Artificial Sequence
  Vaccinia virus GLV-1h189 genome
ttatgagaccatcaaagagagaaagagaataaaaatatttttgtaaaactttttttatgagaccatcaaagagagaaagagaataaaaatatttttgtaaaacttttttatgagaccatcaaagagagaaagagaataaaaatatttttgtaaaacttttttatgagaccatcaaagagagaaagagaataaaaatatttttgtaaaactttttttatgagaccatcaaagagagaaagagaataaaaatatttttgtaaaactttttttatgagaccatcaaagagagaaagagaataaaaatatttttgtaaaactttttttatgagaccatcaaagagagaaagagaataaaaatatttttgtaaaactttttttatgagaccatcaaagagagaaagagaataaaaatatttttgtaaaactttttttatgagaccatcaaagagagaaagagaataaaaatatttttgtaaaactttttttatgagaccatcaaagagagaaagagaataaaaatatttttgtaaaactttttttatgagaccatcaaagagagaaagagaataaaaatatttttgtaaaactttttttatgagaccatcaaagagagaaagagaataaaaatatttttgtaaaactttttttatgagaccatcaaagagagaaagagaataaaaatatttttgtaaaactttttttatgagaccatcaaagagagaaagagaataaaaatatttttgtaaaactttttttatgagaccatcaaagagagaaagagaataaaaatatttttgtaaaactttttttatgagaccatcagaaagaggtttaatatttttgtgatactctgaaaggaaataggaataggaataggaatagtgtcataatcgtatcacactattgagacagaaaaagaagaagtcgcgagaggtaactttttgtgaatgtagttaagaacatttttgttttgcaaaccggaatatagtgtccggtacacttttttaattcgtggtgtgcctgaatcgttcgattaaccctactcatccaatttcagatgaatagagttatcgattcagacacacgctttgagttttgttgaatcgatgagtgaagtatcatcggttgcaccttcagatgccgatccgtcgacatacttgaatccatccttgacctcaagttcagatgattccttgcacatgtctccgatacgaacgctaaactctagattcttgacgcattttgtatcgacgatcgttgaaccgatgatatcttcgtaactcactttcttatgagagatgttagacccgagtactggatgggtcttgatgtcgctgtctttctcttcttcgctacatctgatgtcgatagacacttcacagtctttgatcatagcaagagcttcttcatgagtgatcgcgggagagtccttaccttgtcctggggacacgctggacaatctagcattcactgtgtttccatcagcggattctgagatggatttaatctgaggacatttggtgaatccaaagttcattctcagacctccaccgatgatggagtaataagtggtaggaggatctacatcctcgactgatgtggaatcatcttctgattccacctcgggatctggatctgactcggactctgtaatttccgttacggattggcaaatcttatcattggtcggtgtttggtcttgctttgtgactttgataataacatcgattcccatatgatgtttgttttcttcttccgtacacgaggaggaggatgaggatgattgctgaagactggcaggcatagcagctgccgccaggcacatgcatgccaggacgatatattgtttcataattgctattgattgagtactgttctttatgattctacttccttaccgtgcaataaattagaatatattttctacttttacgagaaattaattattgtatttattatttatgggtgaaaaacttactataaaaagtgggtgggtttggaattagtgatcagtttatgtatatcgcaactaccgggcatatggctatcgacatcgagaacattacccacatgataagagattgtatcagtttcgtagtcttgagtattggtattactatatagtatatagatgtcgcccactagagttactgtctccgaatgcggcatgatagtatcattctttgctttcgttaactgtttggaggaagaatctttgttattgcatttaatctcgaaattcagagtgcacacctttctcctgtaaagaaacctgaagtcgctaccttattaagaacggagaagtatccatcacgaaatacgggattacagtctttatgattcatagtaatagttagttccgacgttgagatggattcgctgagaccggtagtggtcgtccgagtacacgacgtgtcgttaactggatacaggttaatttccacatcgatatagttaaacgtatttctgggtacgggttcgcatttatctgcggaagagacggtgtgagaatatgttccgagaccacacggagaacagatgacgtctccggatactccgtatcctattccacattttgtttgggaaacacatgccttgcatccggatgatcctttgagaagacaataatatccgggagagcattcacagattctattgtgagtcgtgttacacgatcgcgtcttccgttacaacttagacaagcgggtaaatgattattgcgagatgtgaaggtacccgaaccacacggcgtacatcgtgtgttagtcttgctatcgcataatctggaagcgtatgttcccggacacaaattatggcgtttgtattcgttgtctttacactttccatcggatggtgcatgcggtgctatatctcttccgtttattattatacatgagagaaacaatatatacgagtataatacggacttcatgatttaataatgtagtaatcgttgtcttgttcctgtttcctacttctccaatcatatagatattttctttctatcatggataatatttgtaatggttctttccgtacaacatactgtttagatgatattgcgcataatttccggaggcaaatacgatagtctagattgaccgatggtagactctaatttattgagtgctttgtcgacgagtttacttttacgctccatcgatagatggcactgttctatgagatcgtcgtacatgggaaatgaaatgtgactgtctgaatgtatggctttaagatagctgtgataccgtatacaggtcggtgtcggagattcgaatctctttgaggcgacttatgtcacgatgatggaatctatcttatcgaatgatatatttttcataaatacacttttatagtcctcgtttaaacagaatttactatgtagttccgcgaatgactcgtcccttaataggcagtaggctagtatcttttttacgtagtaatcgtcgtagggagagacatcttgtagaacaacgatttcgttttgttttctcttctgtaactgcttttctggatggccgtattgattatcgagcgtgatactcgctccatattccaataaccgctttgcaaattgtatattattgacatcgaccgcgtaatatagtagagttatcgatcatatctatatcatccatgtacttgcttagtatatcaaatacatctatcagtatggtttcataacagtgatacccgcaattattaaatctcgataatatcagaccgtacatacatagacggccattgttcgatacgtgatttacagccgcgtgtccatattttccacgataaaccttacgacgtttacatcgacgagattattattaacaaagtagtcgtgtagaggatagttgttgtccgttatctaacatgcatcgaacgaccatatcgccgtaatgtaagtagtttatcagtatggcttgtacgatggattcatcctgttgtctaaatctctttagaatgttatcgatgatgtagtggttatattctctggaatcgtacgaagtaatactacgcattacgtcgacaagagtatgacgtctctcaataagaagattaacgatttccatgtctacattatatggggttactctaaatcgcttgtttagataatacgcctctaatatagggctgacgtcgtatactctacacgtgtccacatcctttattaataataatttaacaatctctatatctatggttgagaaagaccagtagtattggatgggtaaagatcctccttcgtctctgccatggatggaaacattgttatcgatcaaacatttaattacatccttggatagagattgagattctctatgagacgatatatagtaatgaagagagttcttacacatatcactgtcgtacatacaggtacgaaatacgtaaccggtgctgtaacattctgatttaagaagccatagcaatacttctggtctcggattaggcgtcgttacgtatatatccaccaatccgagaccattgattgcataattcgtattcttggacggacgtatccgtttatccacaattaggtattttagcagacgtaagtcgatattatccgaatacagatcgaaatcatttatattcgacttgagttcgttagaggaatttgaatagctggatatcagtagatgcacaatctgagattttacgtatctatgcttactgtatactcctagcggagttaatccttcgttgtttctacaaagtctctcgactccgcgagagaacaatcttaatgtctgtatcgcatttattggagacgtaacaatgtagcgcattgtttcctcgtctatctatatgttttgataagttgtgacacgtttcaatttctagttttatttttttgtacgtcacatcttcatccagtagacgacatagaatagtgcactctctaccacaataatccatagctattctggtgctaattattcctatttcacgaaggcaatcattcctcataagatgataaaaagtgtagtggagatttagtatttagcagtgcggatatgatccaagagggtgagatagtcgttctcgttcagaatctttcgcagcataagtagtatgtcgatatacttatcgttgaagactctttataaaagtctatttgtttatatttattgcggatagcagtatttccctataaaaagtatacgtcctgtggtgtctttaatcatgtacatgaatggatggtttatgtagaccttcgtacgatataccatcgaaaagttaatcgtaaatactcctgtaacggccgatgcttctgtatactcctcattaacatctataaacgtcgtatgtagaaatttttctacagtgatagtttcattacacatcttgctaaaatctgcataatatccgaatatattagtaagtcctaaattttctaaaatcggtaccagattatacggttctgtcatttccactttaaactttggcatatacaagtctatacttttagtagataacataccacaccattttttaaatttttcatctgttatatttttttctatgttatatataccttctatgtcgtccggtagtataattaccatactagagtttccctcgtatggaatatcgataatagagaatcctccgaataattcattaatatgtacatattgcaagttattctcggtacccaccatcatatcaacgctggtaactatattcttagaaatataaaacttgtctgtatatgtaagatgtttagaaaatggatatttccacattgctttaaaatggacggcgctaacaactgtcatacgagtattaatggatagcggactagtcaataaggaattaattttaccatttgtcattgtcttaacccattcgttgattagttcctttgtttggttagcattattaaagtttacagtttgaaaatcgtcttttattttttgtaggaaggaggcgtggaactcgatactatcgctaccgtatattttatttgcggtagctagtgtcgcacaatacggaatatctacctccatgtcatcattattgtcatcgggtgtattctcattcatattctctatatattttgatagttgttcagctgtagaaccagctgctccatgatttagaatagataaagtagataaaatggaaactggagaaatcaaaacattttcatcagggtgttttaagattagttctttaaagatatccatggtatagacctaacgataacgatatatatcataaataaataatgttaaatttcaatttatgtttgtaccccgtattcatacttaacaaattggtattgcgtacacaatcaatcatattacataccattaataatgcaagcataaaaaattgttagtagatgtttctaaatataggttccgtaagcaaagaatataagaatgaagcggtaatgataaaatcaatcgttatctaaaatgatcatactcatttattttattctattatattaacacatacatttttaacagcaacacattcaatattgtattgttatttttatattatttacacaattaacaatatattattagtttatattactgaattaataatataaaattcccaatcttgtcataaacacacactgagaaacagcataaacacagaatccatcaaaaatgttgataaattatctgatgttgttgttcgctgctatgataatcagatcattcgccgatagtggtaacgctatcgaaacgacattgccagaaattacaaacgctacaacagatattccagctatcagattatgcggtccagagggagatggatattgtttacacggtgactgtatccacgctagagatattgacggtatgtattgtagatgctctcatggttatacaggcattagatgtcagcatgtagtattagtagactatcaacgttcagaaaacccaaacactacaacgtcatatatcccatctcccggtattatgcttgtattagtaggcattattatgtgttgtctattatctgtttataggttcactcgacgaactaaactacctatacaagatatggttgtgccataatttttataaatttttttatgagtatttttacaaaaatgtataaagtgtatgtcttatgtatatttataaaaatgctaagtatgcgatgtatctatgttatttgtatttatctaaacaatacctctacctctagatattatacaaaaattttttatttcggcatattaaagtaaaatctagttaccttgaaaatgaatacagtgggtggttccgtatcaccagtaagaacataatagtcaaatacagtatccgattgagattttgcatacaatactagtctagaaagaaatttgtaatcatcttctgtgacgggagtccatatatctgtatcatcgtctagtttatcagtgtcccatgctatattcctgttatcatcattagttaatgaaaataactctcgtgcttcagaaaagtcaaatattgtatccatacatacatctccaaaactatcgcttatacgtttatctttaacgatacctatacctagatggttatttactaacagacattttccagatctattgactataactcctatagtttccacatcaaccaagtaatgatcatctattgttatataacaataacataactcttttccatttttatcagtatgtatatctatatcaacgtcgtcgttgtagtgaatagtagtcattgatctattatatgaaacggatatgtctagaacggcaattgttttacgtccagttaacactttcgttgatttaaagtctagagtctttgcaaacataatatccttatccgactttatatttcctgtagggtggtataattttattttgcctccacatatcggtgtttccaaatatattactagacaatattccatatagttattagttaagggtacccaattagaacacgtacgcttattatcatcatttggatcgtatttcataaaagttattgtgttatcgatgtcaacacattctacattttttaatcgtctatatagtatttttctgatattttctataatatcagaattgtcttccatcggaagttgtatactatcggaatcagttacatgtttaaataattctctgatgtcattccttatacaatcaaattcattattaaacagtttaatagtctgtagacctttatcgtcgtaaatatccattgtcttattagttacgcttatttttatgtgtttttacgttgctttattatattttataagaatgattgtttgacgaatcacgagaactattaagacacattattaggtatatattataaaaaagtttttgattacgatgttataagaggaaagaggacacattaacatcatacatcaattaactacattcttataacatcgtaatcaaaagaattgcaattttgatgtataacaactgtcaatgggttatggaattgtatattacatattatacggtatgttggtaacgacaaataccggtcggtaattgtctgccggtgtaatagaattatatatatctatctattacaccggccttgtatacataataataagttgtggtagtatgatctccatatttataatttaggactttgtattcagtatttttggaatcataaaaaataaaaaaaagttttactaatttaaaatttaaaaagtatttacatttttttcactgtttagtcgcggatatggaattcgatcctgccaaaatcaatacatcatctatagatcatgtaacaatattacaatacatagatgaaccaaatgatataagactaacagtatgcattatccgaaatattatatcaatatcacaaaaataaatacacatttggctaatcaatttcgggcttggaaaaaacgtatcgccggaagggactatatgactaacttatctagagatacaggaatacaacaatcaaaacttactgaaactatacgtaactgtcaaaaaaatagaaacatatatggtctatatatacactacaatttagttattaattggataaccgatgtgattatcaatcaatattaagagggttggtaaattggtacatagctaataatacctatactccaaatacacccaataatacaacaaccatttctgagttggatatcatcaaaatactaaataaatacgaggacgtgtatagagtaagtaaagaaaaagaatgtggaatttgctatgaagttgtttactcaaaacgatagatactttggtttattggattcgtgtactcatatattttgcataacatgcatcaatatatggcatagaacacgaagagaaaccggtgcgtcggataattgtcctatatgccgtacccgttttagaaacataacaatgagcaagttctataagctagttaactaataaataaaaagtttaatttgttgacgacgtatgtcgttattttttctcgtataaaagattaatttgattctaatataatctttagtattggataaatatcaattcaaattaattccattagattatatcataaataaaaatagtagcacacaactacttcagcaaacattctttttataaatgccatctagcgtagcgaggacacaagtgaacctataattatcaaatttattagtatcagtcacatgaaggactttacgtagagtgacgattccactatctgtggtacgaacggtttcatcttctttgatgccatcacccagatgttctataaacttggtatcctcgtccgatttcatatcctttgccaaccaatacatatagctaaactcaggcatatgttccacacatcctgaacaatgaaattctccagaagatgttacaatgtctagatttggacatttggtttcaaccgcgttaacatatgagtgaacacacccatacatgaaagcgatgagaaataggattctcatcttgccaaaatatcactagaaaaaatttatttatcagttttaaaggtataaaaaatacttattgttgctcgaatattttgtatttgatggtatacggaagattagaaatgtaggtattatcatcaactgattctatggttttatgtattctatcatgtttcactattgcgttggaaataatatcatatgcttccacatatattttattttgttttaactcataatactcacgtaattctggattattggcatatctatgaataattttagctccatgatcagtaaatattaatgagaacatagtattaccacctaccattatttttttcatctcattcaattcttaattgcaaagatctatataatcattatagcgttgacttatggactctggaatcttagacgatgtacagtcatctataatcatggcatatttaatacattgttttatagcatagtcgttatctacgatgttagatatttctctcaatgaatcaatcacacaatctaatgtaggtttatgacataatagcattttcagcagttcaatgtttttagattcgttgatggcaatggctatacatgtatatccgttatttgatctaatgttgacatctgaaccggattctagcagtaaagatactagagattgtttattatatctaacagccttgtgaagaagtgtttctcctcgtttgtcaatcatgttaatgtctttaagataaggtaggcaaatgtttatagtactaagaattgggcaagcataagacatgtcacaaagacccttttttgtatgtataagtgtaaaaattataacatccatagttggatttacataggtgtccaatcgggatctctccatcatcgagataattgatggcatctcccttccttttttagtagatatttcatcgtgtaagaatcaatattaatatttctaaagtatccgtgtatagcctctttatttaccacagctccatattccactagagggatatcgccgaatgtcatatactcaattagtatatgttggaggacatccgagttcattgttttcaatatcaaagagatggtttccttatcatttctccatagtggtacaatactacacattattccgtgcggctttccattttccaaaaacaatttgaccaaatctaaatctacatctttattgtatctataatcactatttagataatcagccataattcctcgagtgcaacatgttagatcgtctatatatgaataagcagtgttatctattcctttcattaacaatttaacgatgtctatatctatatgagatgacttaatataatattgaagagctgtacaatagtttttatctataaaagacggcttgattccgtgattaattagacatttaacaacttccggacgcacatatgctctcgtatccgactctgaatacagatgagagatgatatacagatgcaatacggtaccgcaatttcgtagttgataatcatcatacgcgtatcagtactcgtcctcataaagaacactgcagccattttctatgaacaaatcaataattttagaaacaggatcattgtcattacataattttctataactgaacgatggttttcacatttaacactcaagtcaaatccatgttctaccaacacctttatcaagtcaacgtctacatttttggatttcatatagctgaatatattaaagttatttatgttgctaaatccagtggcttctagtagagccatcgctatatccttattaactttaacatgtctactatttgtgtattcttctaatggggtaagctgtctccaatttttgcgtaatggattagtgccactgtctagtagtagtttgacgacctcgacattattacaatgctcattaaaaaggtatgcgtgtaaagcattattcttgaattggttcctggtatcattaggatctctgtctttcaacatctgtttaagttcatcaagagccacctcctcattttccaaatagtcaaacattttgactgaatgagctactgtgaactctatacacccacacaactaatgtcattaaatatcatgtcaaaaacttgtacaattattaataaaaataatttagtgtttaaattttaccagttccagattttacacctccgttaatacctccattaaccccactggacgatcctcctccccacattccaccgccaccagatgtataagttttagatcctttattactaccatcatgtccatggataaagacactccacatgccgccactaccccctttagaagacatattaataagacttaaggacaagtttaacaataaaattaatcacgagtaccctactaccaacctacactattatatgattatagtttctatttttacagtaccttgactaaagtttctagtcacaagagcaatactaccaacctacactattatatgattatagtttctatttttataggaacgcgtacgagaaaatcaaatgtctaatttctaacggtagtgttgataaacgattgttatccgcggatacctcctctatcatgtcgtctattttcttactttgttctattaacttattagcattatatattatttgattataaaacttatattgcttattagcccaatctgtaaatatcggattattaacatatcgtttctttgtaggtttatttaacatgtacatcactgtaagcatgtccttaccatttattttaatttgacgcatatccgcaatttctttttcgcagtcggttataaattctatatatgatggatacatgctacatgtgtacttataatcgactaatatgaagtacttgatacatattttcagtaacgatttattattaccacctatgaataagtacctgtgatcgtctaggtaatcaactgttttcttaatacattcgatggttggtaatttactcagaataatttccaatatcttaatatataattctgctatttctgggatatatttatctgccagtataacacaaatagtaatacatgtaaacccatattttgttattatattaatgtctgcgccattatctattaaccattctactaggctgacactatgcgactcaatacaatgataaagtatactacatccatgtttatctattttgtttatatcatcaatatacggcttacaaagttttagtatcgataacacatccaactcacgcatagagaaggtagggaataatggcataatatttattaggttatcatcattgtcattatctacaactaagtttccattttttaaaatatactcgacaactttaggatctctattgccaaatttttgaaaatatttatttatatgcttaaatctatataatgtagctccttcatcaatcatacatttaataacattgatgtatactgtatgataagatacatattctaacaatagatcttgtatagaatctgtatatcttttaagaattgtggatattaggatattattacataaactattacacaattctaaaatataaaacgtatcacggtcgaataatagttgatcaactatataattatcgattttgtgatttttcttcctaaactgtttacgtaaatagttagatagaatattcattagttcatgaccactatagttactatcgaataacgcgtcaaatatttcccgtttaatatcgcatttgtcaagataataatagagtgtggtatgttcacgataagtataataacgcatctctttttcgtgtgaaattaaatagtttattacgtccaaagatgtagcataaccatcttgtgacctagtaataatataataatagagaactgttttacccattctatcatcataatcagtggtgtagtcgtaatcgtaatcgtctaattcatcatcccaattataatattcaccagcacgtctaatctgttctattttgatcttgtatccatactgtatgttgctacatgtaggtattcctttatccaataatagtttaaacacatctacattgggatttgatgttgtagcgtatttttctacaatattaataccatttttgatactatttatttctatacctttcgaaattagtaatttcaataagtctatattgatgttatcagaacatagatattcgaatatatcaaaatcattgatatttttatagtcgactgacgacaataacaaaatcacaacatcgtttttgatattattatttttcttggtaacgtatgcctttaatggagtttcaccatcatactcatataatggatttgcaccactttctatcaatgattgtgcactgctggcatcgatgttaaatgttttacaactatcatagagtatcttatcgttaaccatgattggttgttgatgctatcgcattttttggtttctttcatttcagttatgtatggatttagcacgtttgggaagcatgagctcatatgatttcagtactgtagtgtcagtactattagtttcaataagatcaatctctagatctatagaatcaaaacacgataggtcagaagataatgaatatctgtaggcttcttgttgtactgtaacttctggttttgttagatggttgcatcgtgctttaacgtcaatggtacaaattttatcctcgctttgtgtatcatattcgtccctactataaaattgtatattcagattatcatgcgatgtgtatacgctaacggtatcaataaacggagcacaccatttagtcataaccgtaatccaaaaatttttaaagtatatcttaacgaaagaagttgtgtcattgtctacggtgtatggtactagatcctcataagtgtatatatctagagtaatgtttaatttattaaatggttgataatatggatcctcgtgacaatttccgaagatggaaataagacataaacacgcaataaatctaattgcggacatggttactccttaaaaaaatacgaataatcaccttggctatttagtaagtgtcatttaacactatactcatattaatccatggactcataatctctatacgggattaacggatgttctatatacggggatgagtagttctcttctttaactttatactttttactaatcatatttagactgatgtatgggtaatagtgtttgaagagctcgttctcatcatcagaataaatcaatatctctgtttttttgttatacagatgtattacagcctcatatattacgtaatagaacgtgtcatctaccttattaactttcaccgcatagttgtttgcaaatacggttaatcctttgacctcgtcgatttccgaccaatctgggcgtataatgaatctaaactttaattgcttgtaatcattcgaaataatttttagtttgcatccgtagttatcccctttatgtaactgtaaatttctcaacgcgatatctccattaataatgatgtcgaattcgtgctgtatacccatactgaatggatgaacgaataccgacggcgttaatagtaatttactttttcatctttacatattgggtactagttttactatcataagtttataaattccacaagctactatggaataagccaaccatcttagtataccacacatgtcttaaagtttattaattaattacatgttgttttatatatatcgctacgaatttaaagagaaattagtttaggaagaaaaattatctatctacatcatcacgtctctgtattctacgatagagtgctactttaagatgcgacagatccgtgtcatcaaatatatactccattaaaatgattattccggcagcgaacttgatattggatatatcacaacctttgttaatatctacgacaatagacagcagtcccatggttccataaacagtgagtttatctttctttgaagagatattttgtagagatcttataaaactgtcgaatgacatcgcatttatatctttagctaaatcgtatatgttaccatcgtaatatctaaccgcgtctatcttaaacgtttccatcgctttaaagacgtttccgatagatggtctcatttcatcagtcatactgagccaacaaatataatcgtgtataacatctttgatagaatcagactctaaagaaaacgaatcggctttattatacgcattcatgataaacttaatgaaaaatgtttttcgttgtttaagttggatgaatagtatgtcttaataattgttattatttcattaattaatatttagtaacgagtacactctataaaaacgagaatgacataactaatcataactagttatcaaagtgtctaggacgcgtaattttcatatggtatagatcctgtaagcattgtctgtattctggagctattttctctatcgcattagtgagttcagaatatgttataaatttaaatcgaataacgaacataactttagtaaagtcgtctatattaactcttttattttctagccatcgtaataccatgtttaagatagtatattctctagttactacgatctcatcgttgtctagaatatcacatactgaatctacatccaattttagaaattggtctgtgttacatatctcttctatattattgttgatgtattgtcgtagaaaactattacgtagaccattttctttataaaacgaatatatagtactccaattatctttaccgatatatttgcacacataatccattctctcaatcactacatctttaagattttcgttgttaagatatttggctaaactatataattctattagatcatcaacagaatcagtatatatttttctagatccaaagacgaactctttggcgtcctctataatattcccagaaaagatattttcgtgttttagtttatcgagatctgatctgttcatatacgccatgattgtacggtacgttatgataaccgcataaaataaaaatccattttcatttttaaccaatactattcataattgagattgatgtaatactttgttactttgaacgtaaagacagtacacggatccgtatctccaacaagcacgtagtaatcaaatttggtgttgttaaacttcgcaatattcatcaatttagatagaaacttatactcatcatctgttttaggaatccatgtattattaccactttccaacttatcattatcccaggctatgtttcgtccatcatcgttgcgcagagtgaataattcttttgtattcggtagttcaaatatatgatccatgcatagatcggcaaagctattgtagatgtgatttttcctaaatctaatataaaactcgtttactagcaaacactttcctgatttatcgaccaagacacatatggtttctaaatctatcaagtggtggggatccatagttatgacgcagtaacatatattattacattcttgactgtcgctaatatctaaatatttattgttatcgtattggattctgcatatagatggcttgtatgtcaaagatatagaacacataaccaatttatagtcgcgctttacattctcgaatctaaagttaagagatttagaaaacattatatcctcggatgatgttatcactgtttctggagtaggatatattaaagtctttacagatttcgtccgattcaaataaatcactaaataatatcccacattatcatctgttagagtagtatcattaaatctattatattttatgaaagatatatcactgctcacctctatatttcgtacatttttaaactgtttgtataatatctctctgatacaatcagatatatctattgtgtcggtagacgataccgttacatttgaattaatggtgttccattttacaacttttaacaagttgaccaattcatttctaatagtatcaaactctccatgattaaatattttaatagtatccattttatatcactacggacacaaagtagctgacataaaccattgtataatttttatgttttatgtttattagcgtacacattttggaagttccggcttccatgtatttcctggagagcaagtagatgatgaggaaccagatagtttatatccgtacttgcacttaaagtctacattgtcgttgtatgagtatgatcttttaaacccgctagacaagtatccgtttgatattgtaggatgtggacatttaacaatctgacacgtgggtggatcggaccattctcctcctgaacacaggacactagagttaccaatcaacgaatatccactattgcaactataagttacaacgctcccatcggtataaaaatcctcgtatccgttatgtcttccgttggatatagatggaggggattggcatttaacagattcacaaataggtgcctcgggattccataccatagatccagtagatcctaattcacaatacgatttagattcaccgatcaactgatatccgctattacaagagtacgttatactagagccaaagtctactccaccaatatcaagttggccattatcgatatctcgaggcgatgggcatctccgtttaatacattgattaaagagtgtccatccagtacctgtacatttagcatatataggtcccattttttgctttctgtatccaggtagacatagatattctatagtgtctcctatgttgtaattagcattagcatcagtctccacactattcttaaatttcatattaatgggtcgtgacggaatagtacagcatgatagaacgcatcctattcccaacaatgtcaggaacgtcacgctctccaccttcatatttatttatccgtaaaaatgttatcctggacatcgtacaaataataaaaagcccatatatgttcgctattgtagaaattgtttttcacagttgctcaaaaacgatggcagtgacttatgagttacgttacactttggagtctcatctttagtaaacatatcataatattcgatattacgagttgacatatcgaacaaattccaagtatttgattttggataatattcgtattttgcatctgctataattaagatataatcaccgcaagaacacacgaacatctttcctacatggttaaagtacatgtacaattctatccatttgtcttccttaactatatatttgtatagataattacgagtctcgtgagtaattccagtaattacatagatgtcgccgtcgtactctacagcataaactatactatgatgtctaggcatgggagacttttttatccaacgatttttagtgaaacattccacatcgtttaatactacatatttctcatacgtggtataaactccacccattacatatatatcatcgtttacgaataccgacgcgcctgaatatctaggagtaattaagtttggaagtcttatccatttcgaagtgccgtgtttcaaatattctgccacacccgttgaaatagaaaattctaatcctcctattacatataactttccatcgttaacacaagtactaacttctgattttaacgacgacatattagtaaccgttttccattttttcgttttaagatctacccgcgatacggaataaacatgtctattgttaatcatgccgccaataatgtatagacaattatgtaaaacatttgcattatagaattgtctatctgtattaccgactatcgtccaatattctgttctaggagagtaatgggttattgtggatatataatcagagtttttaatgactactatattatgttttataccatttcgtgtcactggctttgtagatttggatatagttaatcccaacaatgatatagcattgcgcatagtattagtcataaacttgggatgtaaaatgttgatgatatctacatcgtttggatttttatgtatccactttaataatatcatagctgtaacatcctcatgatttacgttaacgtcttcgtgggataagatagttgtcagttcatcctttgataattttccaaattctggatcggatgtcaccgcagtaatattgttgattatttctgacatcgacgcattatatagttttttaattccatatcttttagaaaagttaaacatccttatacaatttgtgaaattaatattatgaatcatagtttttacacatagatctactacaggcggaacatcaattattatggcagcaactagtatcatttctacattgtttatggtgatgtttatcttcttccagcgcatatagtctaatagcgattcaaacgcgtgatagtttataccattcaatataatcgcttcatcctttagatggtgatcctgaatgcgtttaaaaaaattatacggagacgccgtaataatttccttattcacttgtataatttccccattgatagaaaatattacgctttccattcttaaagtactataagtaattatagtataatgtaaacgtttatatattcaatatttttataaaaatcattttgacattaattcctttttaaatttccgtctatcatctatagaaacgtattctatgaatttataaaatgcttttacgtgtcctatcgtaggcgatagaaccgctaaaaagcctatcgaatttctacaaaagaatctgttatatggtatagggagagtataaaacattaaatgtccgtacttattaaagtattcagtagccaatcctaactctttcgaatacttattaatggctcttgttctgtacgaatctatttttttgaacaacggacctagtggtatatcttgttctatgtatctaaaataatgtctgactagatccgttagtttaatatccgcagtcatcttgtctagaatggcaaatctaactgcgggtttaggctttagtttagtttctatatctacatctatgtctttatctaacaccaaaaatataatagctaatattttattacaatcatccggatattcttctacgatctcactaactaatgtttctttggttatactagtatagtcactatcggacaaataaagaaaatcagatgatcgatgaataatacatttaaattcatcatctgtaagatttttgagatgtctcattagaatattattagggttagtactcattatcattcggcagctattacttattttattatttttcaccatatagatcaatcattagatcatcaaaatatgtttcaatcatcctaaagagtatggtgaatgactcttcccatctaatttctgaacgttcaccaatgtctctagccactttggcactaatagcgatcattcgcttagcgtcttctatattattaactggttgatttaatctatctagcaatggaccgtcggacagcgtcattctcatgttcttaatcaatgtacatacatcgccgtcatctaccaattcatccaacaacataagctttttaaaatcatcattataataggtttgatcgttgtcatttctccaaagaatatatctaataagtagagtcctcatgcttagttaacaactattttttatgttaaatcaattagtacaccgctatgtttaatacttattcatattttagtttttaggattgagaatcaatacaaaaattaatgcatcattaattttagaaatacttagtttccacgtagtcaatgaaacatttgaactcatcgtacaggacgttctcgtacaggacgtaactataaaccggtttatatttgttcaagatagatacaaatccgataactttttttacgaattctacgggatccactttaaaagtgtcataccgggttctttttatttttttaaacagatcaatggtgtgatgttgattaggtcttttacgaatttgatatagaatagcgtttacatattctccataatggtcaatcgccatttgttcgtatgtcataaattctttaattatatgacactgtgtattatttagttcatccttgttcattgttaggaatctatccaaaatggcaattatactagaactataggtgcgttgtatacacatattgatgtgtctgtttatacaatccatgatatttggatccatgctactaccttcgggtaaaattgtagcatcatataccatttctagtactttaggttcattattatccattgcagaggacgtcatgatcgaatcataaaaaaatatattatttttatgttattttgttaaaaataatcatcgaatacttcgtaagatactccttcatgaacataatcagttacaaaacgtttatatgaagtaaagtatctacgatttttacaaaagtccggatgcataagtacaaagtacgcgataaacggaataataatagatttatctagtctatctttttctatagctttcatagttagatacatggtctcagaagtaggattatgtaacatcagcttcgataaaatgactgggttatttagtcttacacattcgctcatacatgtatgaccgttaactacagagtctacactaaaatgattgaacaatagatagtctaccattgtttcgtattcagatagtacagcgtagtacatggcatcttcacaaattatatcattgtctaatagatatttgacgcatcttatggatcccacttcaacagccatcttaaaatcatattgctttcctttatcattaataatttctagaacatcatctctatcataaaagatacaaatattaactgtttgatccgtaataacattgctagtcaatagcaatttgttaataagatgcgctgggctcaatgtcttaataagaagtgtaagaggactatctccgaatttgttttgtttattaacatccgttgatggaagtaaaagatctataatgtctacattcttgactgttttagagcatacaatatggagaggtgtatttccatcatgatctggttttgagggactaattcctagtttcatcatccatgagattgtagaagcttttggattgtctgacataagatgtctatgaatatgatttttgccaaatttatccactatcctggcttcgaatccgatggacattatttttttaaacactctttctgaaggatctgtacacgccaacaacggaccacatccttcttcatcaaccgagttgttaatcttggctccatactgtaccaataaatttattctctctatgacttcatcatctgttcccgagagataatatagaggtgttttatgctgtttatcacacgcgtttggatctgcgccgtgcgtcagcagcatcgcgactattctattattattaattttagaagctatatgcaatggataatttccatcatcatccgtctcatttggagagtatcctctatgaagaagttcttcgacaaatcgttcatctagtcctttaattccacaatacgcatgtagaatgtgataattatttccagaaggttcgatagcttgtagcatattcctaaatacatctaaatttttactattatatttggcataaagagatagataatactcggccgacataatgttgtccattgtagtataaaaattaatatttctatttctatttctgtatatttgcaacaatttactctctataacaaatatcataacttagtttttttatgtcaagaaggcactggtttagttcatctataaatgtcacgccataactaccacgcatgccatactcagaattatgataaagatatttatccttggggtgtaggtaatggggattaatctttgttggatcagtctctaagttaacacatgtcacacatgatccatttatagttatatcacacgatgatgatttatgaattgattccggaagatcgctatcgtattttgtggttccacaattcatttccatacatgttattgtcacactaatattatgatgaactttatctagccgctgagtggtaaacaacagaacagatagtttattatctttaccaacaccctcagccgctgccacaaatctctgatccgtatccatgatggtcatgtttatttctagtccgtatccagtcaacactatgttagcatttctgtcgatatagctttcactcatatgacactcaccaataatagtagaattaatgtcgtaatttacaccaatagtgagttcggcggcaaagtaccaataccggtaatcttgtcgaggaggacatatagtattcttgtattctaccgaatacccgagagatgcgatacaaaagagcaagactaatttgtaaaccatcttactcaaaatatgtaacaatagtacgatgcaatgagtaagacaataggaaatctatcttatatacacataattattctatcaattttaccaattagttagtgtaatgttaacaaaaatgtgggagaatctaattagtttttctttacacaattgacgtacatgagtctgagttccttgtttttgctaattatttcatccaatttattattcttgacgatatcgagatcttttgtataggagtcaaacttgtattcaacatgcttttctataatcattttagctatttcggcatcatccaatagtacattttccagattagcagaatagatattaatgtcgtatttgaacagagcctgtaacatctcaatgtctttattatctatagccaatttaatgtccggaatgaagagaagggaattattggtgtttgtcgacgtcatatagtcgagcaagagaatcatcatatccacgtgtccattttttatagtgatgtgaatacaactaaggagaatagccagatcaaaagtagatggtatctctgaaagaaagtaggaaacaatacttacatcattaagcatgacggcatgataaaatgaagttttccatccagttttcccatagaacatcagtctccaatttttcttaacaaacagttttaccgtttgcatgttaccactatcaaccgcataatacaatgcggtgtttcccttgtcatcaaattgtgaatcatccagtccactgaatagcaaaatctttactattttggtatcttccaatgtggctgcctgatgtaatggaaattcattctctagaagatttttcaatgctccagcgttcaacaacgtacatactagacgcacgttattatcagctattgcataatacaaggcactatgtccatggacatccgccttaaatgtatctttactagagagaaagcttttcagctgcttagacttccaagtattaattcgtgacagatccatgtctgaaacgagacgctaattagtgtatattttttcattttttataattttgtcatattgcaccagaattaataatatctttaatagatctgattagtagatacatggctatcgcaaaacaacatatacacatttaataaaaataatatttattaagaaaattcagatttcacgtacccatcaatataaataaaataatgattccttacaccgtacccatattaaggagattccaccttacccataaacaatataaatccagtaatatcatgtctgatgatgaacacaaatggtgtattaaattccagtttttcaggagatgatctcgccgtagctaccataatagtagatgcctctgctacagttccttgttcgtcgacatctatctttgcattctgaaacattttataaatatataatgggtccctagtcatatgtttaaacgacgcattatctggattaaacatactaggagccatcatttcggctatcgacttaatatccctcttattttcgatagaaaatttagggagtttaagattgtacactttattccctaattgagacgaccaatagtctaattttgcagccgtgatagaatctgtgaaatgggtcatattatcacctattgccaggtacatactaatattagcatccttatacggaaggcgtaccatgtcatattctttgtcatcgattgtgattgtatttccttgcaatttagtaactacgttcatcatgggaaccgttttcgtaccgtacttattagtaaaactagcattgcgtgttttagtgatatcaaacggatattgccatatacctttaaaatatatagtattaatgattgcccatagagtattattgtcgagcatattagaatctactacattagacataccggatctacgttctactatagaattaattttattaaccgcatctcgtctaaagtttaatctatataggccgaatctatgatattgttgataatacgacggtttaatgcacacagtattatctacgaaactttgataagttagatcagtgtacgtatatttagatgttttcagcttagctaatcctgatattaattctgtaaatgctggacccagatctctttttctcaaatccatagtcttcaataattctattctagtattacctgatgcaggcaatagcgacataaacatagaaaacgaataaccaaacggtgagaagacaatattatcatcttgaatatttttatacgctactataccggcattggtaaatccttgtagacgataggcggacgctgaacacgctaacgatagtatcaataacgcaatcatgattttatggtattaataattaaccttatttttatgttcggtataaaaaaattattgatgtctacacatccttttgtaattgacatctatatatccttttgtataatcaactctaatcactttaacttttacagttttccctaccagtttatccctatattcaacatatctatccatatgcatcttaacactctctgccaagatagcttcagagtgaggatagtcaaaaagataaatatatagagcataatcattctcgtatactctgccctttattacatcacccgcattgggcaacgaataacaaaatgcaagcatcttgttaacgggctcgtaaattgggataaaaattatgtttttattgtcttatatctattttattcaagagaatattcaggaatttctttttccggttgtatctcgtcgcagtatatatcatttgtacattgtttcatattttttaatagtttacaccttttagtaggactagtatcgtacaattcatagctgtattttgaattccaatcacgcataaaaatatcttccaattgttgacgaagacctaatccatcatccggtgtaatattaatagatgctccacatgtatccgtaaagtaatttcctgtccaatttgaggtacctatataggccgttttatcggttaccatatatttggcatggtttaccctagaatacggaatgggaggatcagcatctggtacaataaatagctttacttctatatttatgtttttagattttagcatagcgatagatcttaaaaagtttctcatgataaacgaagatcgttgccagcaactaatcaatagcttaacggatacttgtctgtctatagcggatcttcttaattcatcttctatataaggccaaaacaaaattttacccgccttcgaataaataatagggataaagttcataacagatacataaacgaatttactcgcatttctaatacatgacaataaagcggttaaatcattggttctttccatagtacatagttgttgcggtgcagaagcaataaatacagagtgtggaacgccgcttacgttaatactaagaggatgatctgtattataatacgacggataaaagtttttccaattatatggtagattgttaactccaagataccagtatacctcaaaaatttgagtgagatccgctgccaagttcctattattgaagatcgcaatacccaattccttgacctgagttagtgatctccaatccatgttagcgcttcctaaataaatatgtgtattatcagatatccaaaattttgtatgaagaactcctcctaggatatttgtaatatctatgtatcgtacttcaactccggccatttgtagtctttcaacatcctttaatggtttgttagatttattaacggctactctaactcgtactcctcttttgggtaattgtacaatctcgtttaatattatcgtgccgaaattcgtacccacttcatccgataaactccaataaaaagatgatatatctagtgtttttgtggtattggatagaatttccctccacatgttaaatgtagacaaatatactttatcaaattgcatacctataggaatagtttctgtaatcactgcgattgtattatccggattcattttatttgttaaaagaataatcctatatcacttcactctattaaaaatccaagtttctatttctttcatgactgattttttaacttcatccgtttccttatgaagatgatgtttggcaccttcataaatttttatttctctattacaatttgcatgttgcatgaaataatatgcacctaaaacatcgctaatcttattgtttgttccctggagtatgagagtcggggggtgttaatcttggaaattatttttctaaccttgttggtagccttcaagacctgactagcaaatccagccttaattttttcatgattgactaatgggtcgtattggtatttataaactttatccatatctctagatactgattctggacatagctttccgactggcgcatttggtgtgatggttcccataagtttggcagctagcagattcagtcttgaaacagcatctgcattaactagaggagacattagaatcattgctgtaaacaagtttggattatcgtaagaggctagctcccatggaatgacccaataagtagatttaatagttaccacgtgctgtaccaaagtcatcaatcatcattttttcaccattacttcttccatgtccaatatgatcatgtgagaatactaaaattcctaacgatgatatgttttcagctagttcgtcataacgtccagaatgtttaccagctccatgacttatgaatactaatgccttaggatatgtaataggtttccaatatttacaatatatgtaatcattgtccagattgaacatacagtttgcactcatgattcacgttatataactatcaatattaacagttcgtttgatgatcatattatttttatgttttattgataattgtaaaaacatacaattaaatcaatatagaggaaggagacggctactgtcttttgtaagatagtcatggcgactaaattagattatgaggatgctgttttttactttgtggatgatgataaaatatgtagtcgcgactccatcatcgatctaatagatgaatatattacgtggagaaatcatgttatagtgtttaacaaagatattaccagttgtggaagactgtacaaggaattgatgaagttcgatgatgtcgctatacggtactatggtattgataaaattaatgagattgtcgaagctatgagcgaaggagaccactacatcaattttacaaaagtccatgatcaggaaagtttattcgctaccataggaatatgtgctaaaatcactgaacattggggatacaaaaagatttcagaatctagattccaatcattgggaaacattacagatttgatgaccgacgataatataaacatcttgatactttttctagaaaaaaaattgaattgatgatataggggtcttcataacgcataattattacgttagcattctatatccgtgttaaaaaaaattatcctatcatgtatttgagagttttatatgtagcaaacatgatagctgtgatgccaataagctttagatattcacgcgtgctagtgttagggatggtattatctggtggtgaaatgtccgttatataatctacaaaacaatcatcgcatatagtatgcgatagtagagtaaacatttttatagtttttactggattcatacatcgtctacccaattcggttataaatgaaattgtcgccaatcttacacccaaccccttgttatccattagcatagtattaacttcgttatttatgtcataaactgtaaatgattttgtagatgccatatcatacatgatattcatgtccctattataatcattactaactttatcacaatatatgttgataatatctatatatgatctagtctttgtgggcaactgtctatacaagtcgtctaaacgttgtttactcatatagtatcgaacagccatcattacatggtcccgttccgttgatagataatcgagtatgttagtggacttgtcaaatctatataccatattttctggaagtggatatacatagtcgtgatcaacattattgctagcctcatcttctatatcctgtactataccattatctatatcatctacataatctatgatattattacacataaacatcgacaacatactattgtttattatctaagtcctgttgatccaaacccttgatctcctctatttgtactatctagagattgtacttcttccagttctggataatatatacgttgatagattagctgagctattctatctccagtatttacattaaacgtacattttccattattaataagaatgactcctatgtttcccctataatcttcgtctattacaccacctcctatatcaatgccttttagtgacagaccagacctaggagctattctaccatagcagaacttaggcatggacatactaatatctgtcttaattaactgtctttctcctggagggatagtataatcgtaagcgctatacaaatcatatccggcagcacccggcgattgcctagtaggagatttagctctgttagtttccttaacaaatctaactggtgagttaatattcatgttgaacataaaactaatattttatttcaaaattatttaccatcccatatattccatgaataagtgtgatgattgtacacttctatagtatctatatacgatccacgataaaatcctcctatcaatagcagtttattatccactatgatcaattctggattatccctcggataaataggatcatctatcagagtccatgtattgctggattcacaataaaattccgcatttctaccaaccaagaataaccttctaccgaacactaacgcgcatgatttataatgaggataataagtggatggtccaaactgccactgatcatgattgggtagcaaatattctgtagttgtatcagtttcagaatgtcctcccattacgtatataacattgtttatggatgccactgctggattacatctaggtttcagaagactcggcatattaacccaagcagcatccccgtggaaccaacgctcaacagatgtgggatttggtagacctcctactacgtataatttattgttagcgggtatcccgctagcatacagtctggggctattcatcggaggaattggaatccaattgtttgatatataatttacagctatagcattgttatgtatttcattgttcatccatccaccgatgagatatactacttctccaacatgagtacttgtacacatatggaatatatctataatttgatccatgttcataggatactctatgaatggatacttgtatgatttgcgtggttgtttatcacaatgaaatattttggtacagtctagtatccattttacattatttatacctctgggagaaagataatttgacctgattacatttttgataaggagtagcagatttcctaatttatttcttcgcctcatataccacttaatgacaaaatcaactacataatcctcatctggaacatttagttcatcgctttctagaataagtttcatagatagataatcaaaattgtctatgatgtcatcttccagttccaaaaagtgtttggcaataaagtttttagtatgacataagagattggatagtccgtattctatacccatcatgtaacactcgacacaatattcctttctaaaatctcgtaagataaagtttatacaagtgtagatgataaattctacagaggttaatatagaagcacgtaataaattgacgacgttatgactatctatatatacctttccagtatatgagtaaataactatagaagttaaactgtgaatgtcaaggtctagacaaacccttgtaactggatctttatttttcgtgtatttttgacgtaaatgtgtgcgaaagtaaggagataactttttcaatatcgtagaattgactattatattgcctcctatggcatcaataattgttttgaatttcttagtcatagacaatgctaatatattcttacagtacacagtattgacaaatatcggcatttatgtttctttaaaagtcaacatctagagaaaaatgattatctttttgagacataactcccattttttggtattcacccacacgtttttcgaaaaaattagtttttccttccaatgatatattttccatgaaatcaaacggattggtaacattataaatttttttaaatcccaattcagaaatcaatctatccgcgacgaattctatatatgttttcatcatttcacaattcattcctataagtttaactggaagagccgcagtaagaaattcttgttcaatggatactgcatctgttataatagatctaacggtttcttcactcggtggatgcaataaatgtttaaacatcaaacatgcgaaatcgcagtgcagaccctcgtctctactaattagttcgttggaaaacgtgagtccgggcattaggccacgctttttaagccaaaatatggaagcgaatgatccagaaaagaaaattccttctactgcagcaaaggcaataagtctctctccataaccggcgctgtcatgtatccacttttgagcccaatcggccttcttttttacacaaggcatcgtttctatggcattaaagagatagtttttttcattactatctttaacataagtatcgatcaaaagactatacatttccgaatgaatgttttcaatggccatctgaaatccgtagaaacatctagcctcggtaatctgtacttctgtacaaaatcgttccgccaaattttcattcactattccgtcactggctgcaaaaaacgccaatacatgttttataaaatatttttcgtctggtgttagtttattccaatcattgatatctttagatatatctacttcttccactgtccaaaatgatgcctctgcctttttatacatgttccagatgtcatgatattggattgggaaaataacaaatctatttggatttggtgcaaggatgggttccataactaaattaacaataacaataaattttttttcagttatctatatgcctgtacttggattttttgtacatcgatatcgccgcaatcactacaataattacaagtattattgatagcattgttattagtactatcataattaaattatctacattcatgggtgctgaataatcgttattatcatcattatcattttgtaattgtgacatcatactagataaatcgtttgcgagattgttgtgggaagcgggcatggaggatgcattatcattattatttaacgccttccatttggattcacaaatgttacgcacattcaacattttatggaaactataattttgtgaaaacaaataacaagaaaactcgtcatcgttcaaatttttaacgatagtaaaccgattaaacgtcgagctaatttctaacgctagcgactctgttggatatgggtttccagatatatatcttttcagttcccctacgtatctataatcatctgtaggaaatggaagatatttccatttatctactgttcctaatatcatatgtggtggtgtagtagaaccattaagcgcgaaagatgttatttcgcatcgtattttaacttcgcaataatttctggttagataacgcactctaccagtcaagtcaatgatattagcctttacagatatattcatagtagtcgtaacgatgactccatcttttagatgcgatactcctttgtatgtaccagaatcttcgtacctcaaactcgatatatttaaacaagttaatgagatattaacgcgttttatgaatgatgatatataaccagaagttttatcctcggtggctagcgctataaccttatcattataataccaactagtgtgattaatatgtgacacgtcagtgtgggtacaaatatgtacattatcgtctacgtcgtattcgatacatccgcatacagccaacaaatataaaatgacaaatactctaacgccgttcgtacccatcttgatgcggtttaataaatgttttgatttcaatttattgtaaaaaaagattcggttttatactgttcgatattctcattgcttatattttcatctatcatctccacacagtcaaatccgtggttagcatgcacctcatcaaccggtaaaagactatcggactcttctatcattataactctagaatatttaatttggtcattattaatcaagtcaattatcttatttttaacaaacgtgagtattttactcattttttataaaaacttttagaaatatacagactctatcgtgtgtctatatcttctttttatatccaatgtatttatgtctgatttttcttcatttatcatatataatggtccaaattctacacgtgcttcggattcatccagatcattaaggttcttataattgtaacatccttctcttccctcttctacatcttccttcttattcttattcttagcgtcacagaatctaccacagcaggatcccatgacgagcgtcatattaaactaatccattttcaattataatatatgattagtaatgaccattaaaataaaaaatattcttcataaccggcaagaaagtgaaaagttcacattgaaactatgtcagtagtatacatcatgaaatgatgatatatatatactctattttggtggaggattatatgatataattcgtggataatcatttttaagacacatttctttattcgtaaatcttttcacgttaaatgagtgtccatattttgcaatttcttcatatgatggcggtgtacgtggacgaggctgctcctgttcttgttgtggtcgccgactgtcgtgtctgcgtttagatccctccattatcgcgattgcgtagatggagtactattttataccttgtaattaaatttttttattaattaaacgtataaaaacgttccgtatctgtatttaagagccagatttcgtctaatagaacaaatagctacagtaaaaataactagaataattgctacacccactagaaaccacggatcgtaatacggcaatcggttttcgataataggtggaacgtatattttatttaaggacttaacaattgtctgtaaaccacaatttgcttccgcggatcctgtattaactatctgtaaaagcatatgttgaccgggcggagccgaacattctccgatatctaatttctgtatatctataatattattaacctccgcatacgcattacagttcttttctagcttggataccgcactaggtacatcgtctagatctattcctatttcctcagcgatagctcttctatccttttccggaagcaatgaaatcacttcaataaatgattcaaccatgagtgtgaaactaagtcgagaattactcatgcatttgttagttattcggagcgcgcaatttttaaactgtcctataacctctcctatatgaatagcacaagtgacattagtagggatagaatgttgagctaatttttgtaaataactatctataaaaagattatacaaagttttaaactctttagtttccgccatttatccagtctgagaaaatgtctctcataataaatttttccaagaaactaattgggtgaagaatggaaacctttaatctatatttatcacagtctgttttggtacacatgatgaattcttccaatgccgtactaaattcgatatctttttcgatttctggatatgtttttaataaagtatgaacaaagaaatggaaatcgtaataccagttatgtttaactttgaaattgttttttattttcttgttaatgattccagccacttgggaaaagtcaaagtcgtttaatgccgatttaatacgttcattaaaaacaaactttttatcctttagatgaattattattggttcattggaatcaaaaagtaagatattatcgggtttaagatctgcgtgtaaaaagttgtcgcaacagggtagttcgtagattttaatgtataacagagccatctgtaaaaagataaactttatgtattgtaccaaagatttaaatcctaatttgatagctaactcggtatctactttatctgccgaatacagtgctaggggaaaaattataatgtttcctctttcatattcgtagttagttctcttttcatgttcgaaaaagtgaaacatgcggttaaaatagtttataacattaatattactgttaataactgccggataaaagtgggatagtaatttcacgaatttgatactgtcctttctctcgttaaacgcctttaaaaaaactttagaagaatatctcaatgagagttcctgaccatccatagtttgtatcaataatagcaacatatgaagaacacgtttatacagagtatgtaaaaatgttaatttatagtttaatcccatggcccacgcacacacgattaattttttttcatctccctttagattgttgtatagaaatttgggtactgtgaactccgccgtagtttccatgggactatataattttgtggcctcgaatacaaattttactacatagttatctatcttaaagactataccatatcctcctgtagatatgtgataaaaatcgtcgtttataggataaaatcgtttatccttttgttggaaaaaggatgaattaatgtaatcattctcttctatctttagtagtgtttccttattaaaattcttaaaataatttaacaatctaactgacggagcccaattttggtgtaaatctaattgggacattatattgttaaaatacaaacagtctcctaatataacagtatctgataatctatggggagacatccattgatattcaggggatgaatcattggcaacacccatttattgtacaaaaagccccaatttacaaacgaaagtccaggtttgatagagacaaacaattaactattttgtctctgtttttaacacctccacagtttttaatttctttagtaatgaaattattcacaatatcagtatcttctttatctaccagagattttactaacttgataaccttggctgtctcattcaatagggtagtaatatttgtatgtgtgatattgatatctttttgaattgtttcttttagaagtgattctttgatggtgccagcatacgaattacaataatgcagaaactcggttaacatgcaggaattatagtaagccaattccaattgttgcctgtgttgtattagagtgtcaatatgagcaatggtgtccttgcgtttctctgatagaatgcgagcagcgattttggcgttatcatttgacgatatttctggaatgacgaatcctgtttctactaactttttggtaggacaaagtgaaacaatcaagaagatagcttctcctcctatttgtggaagaaattgaactcctctagatgatctactgacgatagtatctccttgacagatattggaccgaattacagaagtacctggaatgtaaagccctgaaaccccctcattttttaagcagattgttgccgtaaatcctgcactatgcccaagatagagagctcctttggtgaatccatctctatgtttcagtttaaccaagaaacagtcagctggtctaaaatttccatctctatctaatacagcatctaacttgatgtcaggaactatgaccggtttaatgttatatgtaacattgagtaaatccttaagttcataatcatcactgtcatcagttatgtacgatccaaacaatgtttctaccggcatagtggatacgaagatgctatccatcagaatgtttccctgattagtattttctatatagctattcttctttaaacgattttccaaatcagtaactatgttcatttttttaggagtaggacgcctagccagtatggaagaggattttctagatcctctcttcaacatctttgatctcgatggaatgcaaaaccccatagtgaaacaaccaacgataaaaataatattgtttttcactttttataattttaccatctgactcatggattcattaatatctttataagagctactaacgtataattctttataactgaactgagatatatacaccggatctatggtttccataattgagtaaatgaatgctcggcaataactaatggcaaatgtatagaacaacgaaattatactagagttgttaaagttaatattttctatgagctgttccaataaattatttgttgtgactgcgttcaagtcataaatcatcttgatactatccagtaaaccgtttttaagttctggaatattatcatcccattgtaaagcccctaattcgactatcgaatatcctgctctgatagcagtttcaatatcgacggacgtcaatactgtaataaaggtggtagtattgtcatcatcgtgataaactacgggaatatggtcgttagtaggtacggtaactttacacaacgcgatatataactttccttttgtaccatttttaacgtagttgggacgtcctgcagggtattgttttgaagaaatgatatcgagaacagatttgatacgatatttgttggattcctgattattcactataatataatctagacagatagatgattcgataaatagagaaggtatatcgttggtaggataatacatccccattccagtattctcggatactctattgatgacactagttaagaacatgtcttctattctagaaaacgaaaacatcctacatggactcattaaaacttctaacgctcctgattgtgtctcgaatgcctcgtacaaggatttcaaggatgccatagattctttgaccaacgatttagaattgcgtttagcatctgatttttttattaaatcgaatggtcggctctctggtttgctaccccaatgataacaatagtcttgtaaagataaaccgcaagaaaatttatacgcatccatccaaataaccctagcaccatcggatgatattaatgtattattatagattttccatccacaattattgggccagtatactgttagcaacggtatatcgaatagattactcatgtaacctactagaatgatagttcgtgtactagtcataatatctttaatccaatctaaaaaatttaaaattagattttttacactgttaaagttaacaaaagtattacccgggtacgtggatatcatatatggcattggtccattatcagtaatagctccataaactgatacggcgatggtttttatatgtgtttgatctaacgaggaagaaattcgcgcccacaattcatctctagatatgtatttaatatcaaacggtaacacatcaatttcgggacgcgtatatgtttctaaatttttaatccaaatataatgatgacctatatgccctattatcatactgtcaactatagtacacctagggaacttacgatacatctgtttcctataatcgttaaattttacaaatctataacatgctaaaccttttgacgacagccattcattaatttctgatatggaatctgtattctcgataccgtatcgttctaaagccagtgctatatctccctgttcgtgggaacgctttcgtataatatcgatcaacggataatctgaagtttttggagaataatatgactcatgatctatttcgtccataaacaatctagacataggaattggaggcgatgatcttaattttgtgcaatgagtcgtcaatcctataacttctaatcttgtaatattcatcatcgacataatactatctatgttatcatcgtatattagtataccatgaccttcttcatttcgtgccaaaatgatatacagtcttaaatagttacgcaatatctcaatagtttcataattgttagctgttttcatcaaggtttgtatcctgtttaacatgatggcgttctataacgtctctattttctatttttaattttttaaatttttaacgatttactgtggctagatacccaatctctctcaaatatttttttagcctcgcttacaagctgtttatctatactattaaaactgacgaatccgtgattttggtaatgggttccgtcgaaatttgccgaagtgatatgaacatattcgtcgtcgactatcaacaattttgtattattctgaatagtgaaaaccttcacagatagatcattttgaacacacaacgcatctagacttttggcggttgccatagaatatacgtcgttcttatcccaattaccaactagaagtctgatcttaactcctctattaatggctgcttctataatggagttgtaaatgtcgggccaatagtagctattaccgtcgacacgtgtagtgggaactatggccaaatgttcaatatctatactagtcttagctgacctgagtttatcaataactacatcggtatctagatctctagaatatcccaataggtgttccggagaatcagtaaagaacactccacctataggattcttaatatgatacgcagtgctaactggcaaacaacaagccgcagagcataaattcaaccatgaattttttgcgctattaaaggctttaaaagtatcaaatcttctacgaagatctgtggccagcgggggataatcagaatatacacctaacgttttaatcgtatgtatagatcctccagtaaatgacgcgtttcctacataacatctttcatcatctgacacccaaaaacaaccgagtagtagtcccacattattttttttatctatattaacggttataaaatttatatccgggcagtgactttgtagctctcccagatttcttttccctcgttcatctagcaaaactattattttaatccctttttcagatgcctcttttagtttatcaaaaataagcgctcccctagtcgtactcagaggattacaacaaaaagatgctatgtatatatatttcttagctagagtgataatttcgttaaaacattcaaatgttgttaaatgatcggatctaaaatccatattttctggtagtgtttctaccagcctacattttgctcccgcaggtaccgatgcaaatggccacatttagttaacataaaaacttatacatcctgttctatcaacgattctagaatatcatcggctatatcgctaaaattttcatcaaagtcgacatcacaacctaactcagtcaatatattaagaagttccatgatgtcatcttcgtctatttctatatccgtatccattgtagattgttgaccgattatcgagtttaaatcattactaatactcaatccttcagaatacaatctgtgtttcattgtaaatttataggcggtgtatttaagttggtagattttcaattatgtattaatatagcaacagtagttcttgctcctccttgattctagcatcctcttcattattttcttctacgtacataaacatgtccaatacgttagacaacacaccgacgatggcggccgcagatctcgagttatgatctacttccttaccgtgcaataaattagaatatattttctacttttacgagaaattaattattgtatttattatttatgggtgaaaaacttactataaaaagcgggtgggtttggaattagtgaaagcttaaaaattgaaattttattttttttttttggaatataaataagctcgaagtcgacagatctaggcctggtaccaggaggaggaattcagcttaaagatgacttcgaaagtttatgatccagaacaaaggaaacggatgataactggtccgcagtggtgggccagatgtaaacaaatgaatgttcttgattcatttattaattattatgattcagaaaaacatgcagaaaatgctgttatttttttacatggtaacgcggcctcttcttatttatggcgacatgttgtgccacatattgagccagtagcgcggtgtattataccagatcttattggtatgggcaaatcaggcaaatctggtaatggttcttataggttacttgatcattacaaatatcttactgcatggtttgaacttcttaatttaccaaagaagatcatttttgtcggccatgattggggtgcttgtttggcatttcattatagctatgagcatcaagataagatcaaagcaatagttcacgctgaaagtgtagtagatgtgattgaatcatgggatgaatggcctgatattgaagaagatattgcgttgatcaaatctgaagaaggagaaaaaatggttttggagaataacttcttcgtggaaaccatgttgccatcaaaaatcatgagaaagttagaaccagaagaatttgcagcatatcttgaaccattcaaagagaaaggtgaagttcgtcgtccaacattatcatggcctcgtgaaatcccgttagtaaaaggtggtaaacctgacgttgtacaaattgttaggaattataatgcttatctacgtgcaagtgatgatttaccaaaaatgtttattgaatcggatccaggattcttttccaatgctattgttgaaggcgccaagaagtttcctaatactgaatttgtcaaagtaaaaggtcttcatttttcgcaagaagatgcacctgatgaaatgggaaaatatatcaaatcgttcgttgagcgagttctcaaaaatgaacaagcggccgccgccaccatgagcaagggcgaggaactgttcactggcgtggtcccaattctcgtggaactggatggcgatgtgaatgggcacaaattttctgtcagcggagagggtgaaggtgatgccacatacggaaagctcaccctgaaattcatctgcaccactggaaagctccctgtgccatggccaacactggtcactaccttcacctatggcgtgcagtgcttttccagatacccagaccatatgaagcagcatgactttttcaagagcgccatgcccgagggctatgtgcaggagagaaccatctttttcaaagatgacgggaactacaagacccgcgctgaagtcaagttcgaaggtgacaccctggtgaatagaatcgagctgaagggcattgactttaaggaggatggaaacattctcggccacaagctggaatacaactataactcccacaatgtgtacatcatggccgacaagcaaaagaatggcatcaaggtcaacttcaagatcagacacaacattgaggatggatccgtgcagctggccgaccattatcaacagaacactccaatcggcgacggccctgtgctcctcccagacaaccattacctgtccacccagtctgccctgtctaaagatcccaacgaaaagagagaccacatggtcctgctggagtttgtgaccgctgctgggatcacacatggcatggacgagctgtacaagtgagcggccgccctgctagcaagcttgctagcggccgctcgagatctgcggccgctacagacacgaatatgactaaaccgatgaccatttaaaaacccctctctagctttcacttaaactgtatcgatcattcttttagcacatgtataatataaaaacattattctatttcgaatttaggcttccaaaaatttttcatccgtaaaccgataataatatatatagacttgttaatagtcggaataaatagattaatgcttaaactatcatcatctccacgattagagatacaatatttacattctttttgctgtttcgaaactttatcaatacacgttaatacaaacccaggaaggagatattgaaactgaggctgttgaaaatgaaacggtgaatacaataattcagataatgtaaaatcatgattccgtattctgatgatattagaactgctaatggatgtcgatggtatgtatctaggagtatctattttaacaaagcatcgatttgctaatatacaattatccttttgattaattgttattttattcatattcttaaaaggtttcatatttatcaattcttctacattaaaaatttccatttttaatttatgtagccccgcaatactcctcattacgtttcattttttgtctataatatccattttgttcatctcggtacatagattatccaattgagaagcgcatttagtagttttgtacattttaagtttattgacgaatcgtcgaaaactagttatagttaacattttattatttgataccctgatattaatacccctgccgttactattatttataactgatgtaatccacgtaacattggaattaactatcgatagtaatgcatcgacgcttccaaaattgtctattataaactcaccgataatttttttattgcatgttttcatattcattaggattatcaaatctttaatcttattacgattgtatgcgttgatattacaagacgtcattctaaaagacggaggatctccatcaaatgccagacaatcacgtacaaagtacatggaaataggttttgttctattgcgcatcatagatttatatagaacacccgtagaaatactaatttgttttactctataaaatactaatgcatctatttcatcgttttgtataacgtctttccaagtgtcaaattccaaatttttttcattgatagtaccaaattcttctatctctttaactacttgcatagataggtaattacagtgatgcctacatgccgttttttgaaactgaatagatgcgtctagaagcgatgctacgctagtcacaatcaccactttcatatttagaatatatatatgtaaaaatatagtagaatttcattttgtttttttctatgctataaatgaattctcattttgcatctgctcatactccgttttatattaataccaaagaaggaagatatctggttctaaaagccgttaaagtatgcgatgttagaactgtagaatgcgaaggaagtaaagcttcctgcgtactcaaagtagataaaccctcatcgcccgcgtgtgagagaagaccttcgtccccgtccagatgcgagagaatgaataaccctggaaaacaagttccgtttatgaggacggacatgctacaaaatatgttcgcggctaatcgcgataatgtagcttctagacttttgtcctaaaatactattatatccttttcgatattaataaatccgtgtcgtccaggttttttatctctttcagtatgtgaatagataggtattttatctctattcatcatcgaatttaagagatccgataaacattgtttgtattctccagatgtcagcatctgatacaacaatatatgtgcacataaacctctggcacttatttcatgtaccttccccttatcactaaggagaatagtatttgagaaatatgtatacatgatattatcatgaattagatatacagaatttgtaacactctcgaaatcacacgatgtgtcggcgttaagatctaatatatcactcgataacacattttcatctagatacactagacattttttaaagctaaaatagtctttagtagtaacagtaactatgcgattattttcatcgatgatacatttcatcggcatattattacgcttaccatcaaagactataccatgtgtatatctaacgtattctagcatggttgccatacgcgcattaaacttttcaggatctttggatagatcttccaatctatctatttgagaaaacatttttatcatgttcaatagttgaaacgtcggatccactatatagatattatctataaagattttaggaactacgttcatggtatcctggcgaatattaaaactatcaatgatatgattatcgttttcatcttttatcaccatatagtttctaagatatgggattttacttaatataatattatttcccgtgataaattttattagaaaggccaaatctataagaaaagtcctagaattagtctgaagaatatctatatcgccgtatagtatatttggattaattagatatagagaatatgatccgtaacatatacaacttttattatggcgtctaagatattcttccatcaacttattaacatttttgactagggaagatacattatgacgtcccattacttttgccttgtctattactgcgacgttcatagaatttagcatatctcttgccaattcttccattgatgttacattataagaaattttagatgaaattacatttggagctttaatagtaagaactcctaatatgtccgtgtatgtggtcactaatacagattgtagttctataatcgtaaataatttacctatattatatgtttgagtctgtttagaaaagtagctaagtatacgatcttttatttctgatgcagatgtattaacatcggaaaaaaatctttttttattcttttttactaaagatacaaatatgtctttgttaaaaacagttattttctgaatatttctagcttgtaattttaacatatgatattcgttcacactaggtactctgcctaaataggtttctataatctttaatgtaatattaggaaaagtattctgatcaggattcctattcattttgaggatttaaaactctgattattgtctaatatggtctctacgcaaactttttcacagagcgatagagtttttgataactcgtttttcttaagaaatataaaactactgtctccagagctcgctctatcttttattttatctaattcgatacaaactcctgatactggttcagaaagtaattcattaattttcagtcctttatagaagatatttaatatagataatacaaaatcttcagtttttgatatcgatctgattgatcctagaactagatatattaataacgtgctcattaggcagtttatggcagcttgataattagatatagtatattccagttcatatttattagataccgcattgcccagattttgatattctatgaattcctctgaaaataaatccaaaataactagacattctattttttgtggattagtgtactctcttccctctatcatgttcactactggtgtccacgatgataaatatctagagggaatataatatagtccataggatgccaatctagcaatgtcgaataactgtaattttattcttcgctcttcattatgaattgattcttgaggtataaacctaacacaaattatattattagacttttcgtatgtaatgtctttcatgttataagtttttaatcctggaatagaatctattttaatgaggcttttaaacgcagagttctccaacgagtcaaagcataatactctgttgtttttcttatatacgatgttacgattttcttctttgaatggaataggtttttgaattagtttataattacaacataatagataaggaagtgtgcaaatagtacgcggaaaaaacataatagctcccctgttttcatccatggttttaagtaaatgatcactggcttctttagtcaatggatattcgaacattaaccgtttcatcatcattggacagaatccatatttcttaatgtaaagagtgatcaaatcattgtgtttattgtaccatcttgttgtaaatgtgtattcggttatcggatctgctcctttttctattaaagtatcgatgtcaatctcgtctaagaattcaactatatcgacatatttcatttgtatacacataaccattactaacgtagaatgtataggaagagatgtaacgggaacagggtttgttgattcgcaaactattctaatacataattcttctgttaatacgtcttgcacgtaatctattatagatgccaagatatctatataattattttgtaagatgatgttaactatgtgatctatataagtagtgtaataattcatgtattttgatatatgttccaactctgtctttgtgatgtctagtttcgtaatatctatagcatcctcaaaaaatatattcgcatatattcccaagtcttcagttctatcttctaaaaaatcttcaacgtatggaatataataatctattttacctcttctgatatcattaatgatatagtttttgacactatcttctgtcaattgattcttattcactatatctaagaaacggatagcgtccctaggacgaactactgccattaatatctctattatagcttctggacataattcatctattataccagaattaatgggaactattccgtatctatctaacatagttttaagaaagtcagaatctaagacttgatgttcatatattggttcatacatgaaatgatctctattgatgatagtgactatttcattctctgaaaattggtaactcattctatatatgctttccttgttgatgaaggatagaatatactcaatagaatttgtaccaacaaactgttctcttatgaatcgtatatcatcatctgaaataatcatgtaaggcatacatttaacaattagagacttgtctcctgttatcaatatactattcttgtgataatttatgtgtgaggcaaatttgtccacgttctttaattttgttatagtagatatcaaatccaatggagctacagttcttggcttaaacagatatagtttttctggaacaaattctacaacattattataaaggactttgggtagataagtgggatgaaatcctattttaattaatgcgatagccttgtcctcgtgcagatatccaaacgcttttgtgatagtatggcattcattgtctagaaacgctctacgaatatctgtgacagatatcatctttagagaatatactagtcgcgttaatagtactacaatttgtattttttaatctatctcaataaaaaaattaatatgtatgattcaatgtataactaaactactaactgttattgataactagaatcagaatctaatgatgacgtaaccaagaagtttatctactgccaatttagctgcattatttttagcatctcgtttagattttccatcggccttatcgaatactcttccgtcgatgtctacacaggcataaaatgtaggagagttactaggcccaactgattcaatacgaaaagaccaatctctcctagtaatttggcagtactcattaataacggtgacagggttagcatctttccaatcaataatttttttagccggaataacatcatcaaaagacttatgatcctctctcattgatttttcgcgggatacatcatctattatgacgtcagccatagcatcagcatccggcttatccgcctccgttgtcataaaccaacgaggaggaatatcgtcggagctgtacaccatagcactacgttgaagatcgtacagagctttattaacttctcgcttctccatattaagttgtctagttagttgtgcagcagtagctccttcgattccaatgtttttaatagccgcacacacaatctctgcgtcagaacgctcgtcaatatagatcttagacatttttagagagaactaacgcaaccagcaataaaactgaacctactttatcatttttttattcatcatcctctggtggttcgtcgttcctatcaaatgtagctctgattaacccgtcatctataggtgatgctggttctggagattctggaggagatggattattatctggaagaatctctgttatttccttgttttcatgtatcgattgcgttgtaacattaagattgcgaaatgctctaaatttgggaggcttaaagtgttgtttgcaatctctacacgcgtgtctaactagtggaggttcgtcagctgctctagtttgaatcatcatcggcgtagtattcctacttttacagttaggacacggtgtattgtatttctcgtcgagaacgttaaaataatcgttgtaactcacatcctttattttatctatattgtattctactcctttcttaatgcattttataccgaataagagatagcgaaggaattctttttcggtgccgctagtacccttaatcatatcacatagtgttttatattccaaatttgtggcaatagacggtttatttctatacgatagtttgtttctggaatcctttgagtattctataccaatattattctttgattcgaatttagtttcttcgatattagattttgtattacctatattcttgatgtagtactttgatgatttttccatggcccattctattaagtcttccaagttggcatcatccacatattgtgatagtaattctcggatatcagtagcggctaccgccattgatgtttgttcattggatgagtaactactaatgtatacattttccatttataacacttatgtattaactttgttcatttatattttttcattattatgttgatattaacaaaagtgaatatatatatgttaataattgtattgtggttatacggctacaattttataatgagtgaaagtcagtgtccgatgatcaatgacgatagctttactctgaaaagaaagtatcaaatcgatagtgcggagtcaacaataaaaatggataagaagaggataaagtttcagaatagagccaaaatggtaaaagaaataaatcagacaataagagcagcacaaactcattacgagacattgaaactaggatacataaaatttaagagaatgattatgactactactctagaagatatagcaccatctattccaaataatcagaaaacttataaactattctcggacatttcagccatcggcaaagcatcacagaatccgagtaagatggtatatgctctgctgctttacatgtttcccaatttgtttggagatgatcatagattcattcgttatagaatgcatccaatgagtaaaatcaaacacaagatcttctctcctttcaaacttaatcttattagaatattagtggaagaaagattctataataatgaatgcagatctaataaatggagaataattggaacacaagttgataaaatgttgatagctgaatctgataaatatacaatagatgcaaggtataacctaaaacccatgtatagaatcaagggagaatctgaagaagataccctctttatcaaacagatggtagaacaatgtgtgacatcccaggaattggtggaaaaagtgttgaagatactgtttagagatttgttcaagagtggagaatacaaagcgtacagatacgatgatgatgtagaaaatggatttattggattggatacactaaaattaaacattgttcatgatatagttgaaccatgtatgcctgttcgtaggccagtggctaagatactgtgtaaagaaatggtaaataaatactttgagaatccgctacatattattggtaaaaatcttcaagagtgcattgactttgttagtgaataggcatttcatctttctccaatactaattcaaattgttaaattaataatggatagtataaatagttattagttataagatagtaaaaataattattagaataagagtgtagtatcatagataactctcttctataaaaatggattttattcgtagaaagtatcttatatacacagtagaaaataatatagattttttaaaggatgatacattaagtaaagtaaacaattttaccctcaatcatgtactagctctcaagtatctagttagcaattttcctcaacacgttattactaaggatgtattagctaataccaatttttttgttttcatacatatggtacgatgttgtaaagtgtacgaagcggttttacgacacgcatttgatgcacccacgttgtacgttaaagcattgactaagaattatttatcgtttagtaacgcaatacaatcgtacaaggaaaccgtgcataaactaacacaagatgaaaaatttttagaggttgccgaatacatggacgaattaggagaacttataggcgtaaattatgacttagttcttaatccattatttcacggaggggaacccatcaaagatatggaaatcatttttttaaaactgtttaagaaaacagacttcaaagttgttaaaaaattaagtgttataagattacttatttgggcatacctaagcaagaaagatacaggcatagagtttgcggataatgatagacaaaatatatacactctatttcaacaaactggtagaatcgtccatagcaatctaacagaaacgtttagagattatatctttcccggagataagactagctattgggtgtggttaaacgaaagtatagctaatgatgcggatatcgttcttaatagacacgccattaccatgtatgataaaattcttagttatatatactctgagataaaacaaggacgcgttaataaaaacatgcttaagttagtttatatctttgagcctgaaaaagatatcagagaacttctgctagaaatcatatatgatattcctggagatatcctatctattattgatgcaaaaaacgacgattggaaaaaatattttattagtttttataaagctaattttattaacggtaatacatttattagtgatagaacgtttaacgaggacttattcagagttgttgttcaaatagatcccgaatatttcgataatgaacgaattatgtctttattctctacgagtgctgcggacattaaacgatttgatgagttagatattaataacagttatatatctaatataatttatgaggtgaacgatatcacattagatacaatggatgatatgaagaagtgtcaaatctttaacgaggatacgtcgtattatgttaaggaatacaatacatacctgtttttgcacgagtcggatcccatggtcatagagaacggaatactaaagaaactgtcatctataaaatccaagagtagacggctgaacttgtttagcaaaaacattttaaaatattatttagacggacaattggctcgtctaggtcttgtgttagatgattataaaggagacttgttagttaaaatgataaaccatcttaagtctgtggaggatgtatccgcattcgttcgattttctacagataaaaaccctagtattcttccatcgctaatcaaaactattttagctagttataatatttccatcatcgtcttatttcaaaggtttttgagagataatctatatcatgtagaagaattcttggataaaagcatccatctaaccaagacggataagaaatatatacttcaattgataagacacggtagatcatagaacagaccaaatatattattaataatttgtatatacatagatataattatcacacatttttgataaatgggaactgctgcaacaattcagactcccaccaaattaatgaataaagaaaatgcagaaatgattttggaaaaaattgttgatcatatagttatgtatattagtgacgaatcaagtgattcagaaaataatcctgaatatattgattttcgtaacagatacgaagactatagatctctcattataaaaagtgatcacgagtttgtaaagctatgtaaaaatcatgcggagaaaagttctccagaaacgcaacaaatgattatcaaacacatatacgaacaatatcttattccagtatctgaagtactattaaaacctataatgtccatgggtgacataattacatataacggatgtaaagacaatgaatggatgctagaacaactctctaccctaaactttaacaatctccgcacatggaactcatgtagcataggcaatgtaacgcgtctgttttatacattttttagttatctgatgaaagataaactaaatatataagtataatcccattctaatactttaacctgatgtattagcatcttattagaatattaacctaactaaaagacataacataaaaactcattacatagttgataaaaagcggtaggatataaatattatggctgccaccgttccgcgttttgacgacgtgtacaaaaatgcacaaagaagaattctagatcaagaaacattttttagtagaggtctaagtagaccgttaatgaaaaacacatatctatttgataattacgcgtatggatggataccagaaactgcaatttggagtagtagatacgcaaacctagatgctagtgactattatcccatttcgttgggattacttaaaaagttcgagtttctcatgtctctatataaaggtcctattcccgtatatgaagaaaaagtaaatactgaattcatagccaatggatcgttctctggtagatacgtatcatatcttcgaaagttttctgcccttccaacaaacgagtttattagttttttgttactgacttccattccaatctataatatcttgttctggtttaaaaacacacagtttgatattactaaacacacattattcagatacgtctatacagataatgccaaacacctggcgttggctaggtatatgcatcaaacaggagactataagcctttgtttagtcgtctcaaagagaattatatatttaccggtcccgttccaataagtatcaaagatatagatcaccctaatcttagtagagcaagaagtccatccgattatgagacattagctaatattagtactatattgtactttaccaagtatgatccggtattaatgtttttattgttttacgtacctgggtattcaattactacaaaaattactccagccgtagaatatctaatggataaactgaatctaacaaagagcgacgtacaactgttgtaaattattttatgcttcgtaaaatgtaggttttgaaccaaacattctttcaaagaatgagatgcataaaactttattatccaatagattgactatttcggacgtcaatcgtttaaagtaaacttcgtaaaatattctttgatcactgccgagtttaaaacttctatcgataattgtctcatatgttttaatatttacaagttttttggtccatggtacattagccggacaaatatatgcaaaataatatcgttctccaagttctatagtttctggattatttttattatattcagtaactaaatacatattagggttatctgcggatttataatttgagtgatgcattctactcaacataaataattctagaggagacgatctactatcaaattcggatcgtaaatctgtttctaaagaacggagaatatctatacatacctgattagaattcatccgtccttcagacaacatctcagacagtctggttttgtacatcttaatcatattcttatgaaacttggaaacatctcttctagtttcactagtacctttattaattctctcaggtacagattttgaattcgacgatgctgagtatttcatcgttgtatatttcttcttcgattgcataatcagattcttatataccgcctcaaactctattttaaaattattaaacaatactctattattaatcagtcgttctaactctttcgctatttctatagacttatctacatcttgactgtctatctctgtaaacacggagtcggtatctccatacacgctacgaaaacgaaatctgtaatctataggcaacgatgttttcacaatcggattaatatctctatcgtccatataaaatggattacttaatggattggcaaaccgtaacataccgttagataactctgctccatttagtaccgattctagatacaagatcattctacgtcctatggatgtgcaactcttagccgaagcgtatgagtatagagcactatttctaaatcccatcagaccatatactgagttggctactatcttgtacgtatattgcatggaatcatagatggccttttcagttgaactggtagcctgttttagcatctttttatatctggctctctctgccaaaaatgttcttaatagtctaggaatggttccttctatcgatctatcgaaaattgctatttcagagatgaggttcggtagtctaggttcacaatgaaccgtaatatatctaggaggtggatatttctgaagcaatagctgattatttatttcttcttccaatctattggtactaacaacgacaccgactaatgtttccggagatagatttccaaagatacacacattaggatacagactgttataatcaaagattaatacattattactaaacattttttgttttggagcaaataccttaccgccttcataaggaaacttttgttttgtttctgatctaactaagatagttttagtttccaacaatagctttaacagtggacccttgatgactgtactcgctctatattcgaataccatggattgaggaagcacatatgttgacgcacccgcgtctgtttttgtttctactccataatactcccacaaatactgacacaaacaagcatcatgaatacagtatctagccatatctaaagctatgtttagattataatccttatacatctgagctaaatcaacgtcatcctttccgaaagataatttatatgtatcattaggtaaagtaggacataatagtacgactttaaatccattttcccaaatatctttacgaattactttacatataatatcctcatcaacagtcacataattacctgtggttaaaacctttgcaaatgcagcggctttgcctttcgcgtctgtagtatcgtcaccgatgaacgtcatttctctaactcctctatttaatactttacccatgcaactgaacgcgttcttggatatagaatccaatttgtacgaatccaatttttcaaatttttgaatgaatgaatatagatcgaaaaatatagttccattattgttattaacgtgaaacgtagtattggccatgccgcctactcccttatgactagactgatttctctcataaatacagagatgtacagcttcctttttgtccggagatctaaagataattttctctcctgttaataactctagacgattagtaatatatctcagatcaaagttatgtccgttaaaggtaacgacgtagtcgaacgttagttccaacaattgtttagctattcgtaacaaaactatttcagaacatagaactagttctcgttcgtaatccatttccattagtgactgtatcctcaaacatcctctatcgacggcttcttgtatttcctgttccgttaacatctcttcattaatgagcgtaaacaataatcgtttaccacttaaatcgatataacagtaacttgtatgcgagattgggttaataaatacagaaggaaacttcttatcgaagtgacactctatatctagaaataagtacgatcttgggatatcgaatctaggtatttttttagcgaaacagttacgtggatcgtcacaatgataacatccattgttaatctttgtcaaatattgctcgtccaacgagtaacatccgtctggagatatcccgttagaaatataaaaccaactaatattgagaaattcatccatggtggcattttgtatgctgcgtttctttggctcttctatcaaccacatatctgcgacggagcattttctatctttaatatctagattataacttattgtctcgtcaatgtctatagttctcatctttcccaacggcctcgcattaaatggaggaggagacaatgactgatatatttcgtccgtcactacgtaataaaagtaatgaggaaatcgtataaatacggtctcgccatttcgacatctggatttcagatataaaaatctgttttcaccgtgactttcaaaccaattaatgcaccgaacatccatttatagaatttagaaatatattttcatttaaatgaatcccaaacattggggaagagccgtatggaccattatttttatagtactttcgcaagcgggtttagacggcaacatagaagcgtgtaaacgaaaactatatactatagttagcactcttccatgtcctgcatgtagacggcacgcgactatcgctatagaggacaataatgtcatgtctagcgatgatctgaattatatttattattttttcatcagattatttaacaatttggcatctgatcccaaatacgcgatcgatgtgacaaaggttaaccctttataaacttaacccattataaaacttatgattagtcacaactgaaataaccgcgtgattattttttggtataattctacacggcatggtttctgtgactatgaattcaacccccgttacattagtgaaatctttaacaaacagcaagggttcgtcaaagacataaaactcattgtttacaatcgaaatagaccccctatcacacttaaaataaaaaatatccttatcctttaccaccaaataaaattctgattggtcaatgtgaatgtattcacttaacagttccacaaatttatttattaactccgaggcacatacatcgtcggtattttttatggcaaactttactcttccagcatccgtttctaaaaaaatattaacgagttccatttatatcatccaatattattgaaatgacgttgatggacagatgatacaaataagaaggtacggtacctttgtccaccatctcctccaattcatgctctattttgtcattaactttaatgtatgaaaacagtacgccacatgcttccatgacagtgtgtaacactttggatacaaaatgtttgacattagtataattgtccaagactgtcaatctataatagatagtagctataatatattctatgatggtattgaagaagatgacaaccttggcatattgatcatttaacacagacatggtatcaacagatagcttgaatgaaagagaatcagtaattggaataagcgtcttctcgatagagtgtccgtataccaacatgtctgatattttgatgtattccattaaattatttagttttttctttttattctcgttaaacagcatttctgtcaacggaccccaacatcgttgaccgattaagttttgattgatttttccgtgtaaggcgtatctagtcagatcgtatagcctatccaataatccatcgtctgtgtgtagatcacatcgtacactttttaattctctatagaagagcgacagacatctggagcaattacagacagcaatttctttattctctacagatgtaagatacttgaagacattcctatgatgatgcagaattttggataacacggtattgatggtatctgttaccataattcctttgatggctgatagtgtcagagcacaagatttccaatctttgacaatttttagcaccattatctttgttttgatatctatatcagacagcatggtgcgtctgacaacacagggattaagacggaaagatgaaatgattctctcaacatcttcaatagataccttgctattttttctggcattatctatatgtgcgagaatatcctctagagaatcagtatcctttttgatgatagtggatctcaatgacatgggacgtttaaaccttcttattctatcaccagattgcatggtgatttgtcttctttcttttatcataatgtaatctctaaattcatcggcaaattgtctatatctaaaatcataatatgagatgtttacctctacaaatatctgttcgtccaatgttagagtatttacatcagttttgtattccaaattaaacatggcaacggatttaattttatattcctctattaagtcctcgtcgataataacagaatgtagataatcatttaatccgtcgtacatggttggaagatgcttgttgacaaaatctttaattgtcttgatgaaggtgggactatatctaacatcttgattaataaaatttataacattgtccataggatactttgtaactagttttatacacatctcttcatcggtaagtttagacagaatatcgtgaacaggtggtatattatattcatcagatatacgaagaacaatgtccaaatctatattgtttaatatattatatagatgtagcgtagctcctacaggaatatctttaactaagtcaatgatttcatcaaccgttagatctattttaaagttaatcatataggcattgatttttaaaaggtatgtagccttgactacattctcattaattaaccattccaagtcattgtgtgtaagaagattatattctatcataagcttgactacatttggtcccgataccattaaagaattcttatgatataaggaaacagattttaggtactcatctactctacaagaattttggagagccttaacgatatcagtgacgtttattatttcaggaggaaagaatctaacattgagaatatcggaattaatagcttccagatacagtgattttggcaatagtccgtgtaatccataatccagtaacacgagctggtgcttgctagacaccttttcaatgtttaatttttttgaaataagctttgataaagccttcctcgcaaattccggatacatgaacatgtcggcgacatgattaagtattgttttttcattatttttatattttctcaacaagttctcaataccccaatagatgatagaatatcacccaatgcgtccatgttgtctatttccaacaggtcgctatatccaccaatagaagtttttccaaaaaagattctaggaacagttctaccaccagtaatttgttcaaaataatcccgcaattcattttcgggtttaaattctttaatatcgacaatttcatacgctcctcttttgaaactaaacttatttagaatatccagtgcatttctacaaaaaggacatgtatacttgacaaaaattgtcactttgttattggccaacctttgttgtacaaattcctcggccattttaatatttaagtgatataaaactatctcgacttatttaactctttagtcgagatatatggacgcagatagctatatgatagccaactacagaaggcaaacgctataaaaaacataattacgacgagcatatttataaatatttttattcagcattacttgatatagtaatattaggcacagtcaaacattcaaccactctcgatacattaactctctcattttctttaacaaattctgcaatatcttcgtaaaaagattcttgaaactttttagaatatctatcgactctagatgaaatagcgttcgtcaacatactatgttttgtatacataaaggcgcccattttaacagtttctagtgacaaaatgctagcgatcctaggatcctttagaatcacatagattgacgattcgtctctcttagtaactctagtaaaataatcatacaatctagtacgcgaaataatattatccttgacttgaggagatctaaacaatctagttttgagaacatcgataagttcatcgggaatgacatacatactatctttaatagaactcttttcatccagttgaatggattcgtccttaaccaactgattaatgagatcttctattttatcattttccagatgatatgtatgtccattaaagttaaattgtgtagcgcttctttttagtctagcagccaatactttaacatcactaatatcgatatacaaaggagatgatttatctatggcattaagaattcgtttttcgacatccgtcaaaaccaattcctttttgcctgtatcatccagttttccatcctttgtaaagaaattattttctactagactattaataagactgataaggattcctccataattgcacaatccaaactttttaacaaaactagactttacgagatctacaggaatgcgtacttcaggttttttagcttgtgattttttcttttgcggacattttctagtaaccaactcatctaccatttcattgattttagcagtgaaataagctttcaatgcacgggcactgatactattgaaaacgagttgatcttcaaattccgccatttaagttcaccaaacaacttttaaatacaaatatatcaatagtagtagaataagaactataaaaaaaataataattaaccaaccccaacaaccggtattattagttgatgtggtagttttctcatcacttagaacagatttaacaatttctataaagtctgtcaaatcatcttccggagaccccataaatacaccaaatatagcggcgtacaacttatccatttatacattgaatattggcttttctttatcgctatcttcatcatattcatcatcaatatcaacaagtcccagattacgagccagatcttcttctacattttcagtcattgatacacgttcactatctccagagagtccgataacgttagccaccacttctctatcaatgattagtttcttgagcgcgaaagtaatttttgtttccgttccggatctatagaagacgataggtgtgataattgccttggccaattgtctttctcttttactgagtgattctagttcaccttctatagatctgagaatggatgattctccagtcgaaacatattctaccatggatccgtttaatttgttgatgaagatggattcatccttaaatgttttctctgtaatagtttccaccgaaagactatgcaaagaatttggaatgcgttccttgtgcttaatgtttccatagacggcttctagaagttgatacaacataggactagccgcggtaacttttatttttagaaagtatccatcgcttctatcttgtttagatttatttttataaagtttagtctctccttccaacataataaaagtggaagtcatttgactagataaactatcagtaagttttatagagatagacgaacaattagcgtattgagaagcatttagtgtaacgtattcgatacattttgcattagatttactaatcgattttgcatactctataacacccgcacaagtctgtagagaatcgctagatgcagtaggtcttggtgaagtttcaactctcttcttgattaccttactcatgattaaacctaaataattgtactttgtaatataatgatatatattttcactttatctcatttgagaataaaaatgtttttgtttaaccactgcatgatgtacagatttcggaatcgcaaaccaccagtggttttattttatccttgtccaatgtgaattgaatgggagcggatgcgggtttcgtacgtagatagtacattcccgtttttagaccgagactccatccgtaaaaatgcatactcgttagtttggaataactcggatctgctatatggatattcatagattgactttgatcgatgaaggctcccctgtctgcagccatttttatgatcgtcttttgtggaatttcccaaatagttttataaactcgcttaatatcttctggaaggtttgtattctgaatggatccaccatctgccataatcctattcttgatctcatcattccataattttctctcggttaaaactctaaggagatgcggattaactacttgaaattctccagacaatactctccgagtgtaaatattactggtatacggttccaccgactcattatttcccaaaatttgagcagttgatgcagtcggcataggtgccaccaataaactatttctaagaccgtatgttctgattttatcttttagaggttcccaattccaaagatccgacggtacaacattccaaagatcatattgtagaataccgttactggcgtacgatcctacatatgtatcgtatggtccttccttctcagctagttcacaactcgcctctaatgcaccgtaataaatggtttcgaagatcttcttatttagatcttgtgcttccaggctatcaaatggataatttaagagaataaacgcgtccgctaatccttgaacaccaataccgataggtctatgtctcttattagagatttcagcttctggaataggataataattaatatctataattttattgagatttctgacaattactttgaccacatccttcagtttgagaaaatcaaatcgcccatctattacaaacatgttcaaggcaacagatgccagattacaaacggctacctcattagcatccgcatattgtattatctcagtgcaaagattactacacttgatagttcctaaattttgttgattactctttttgttacacgcatccttataaagaatgaatggagtaccagtttcaatctgagattctataatcgctttccagacgactcgagcctttattatagatttgtatctcctttctctttcgtatagtgtatacaatcgttcgaactcgtctccccaaacattgtccaatccaggacattcatccggacacatcaacgaccactctccgtcatccttcactcgtttcataaagagatcaggaatccaaagagctataaatagatctctggttctatgttcctcgtttcctgtattctttttaagatcgaggaacgccataatatcagaatgccacggttccaagtatatggccataactccaggccgtttgtttcctccctgatctatgtatctagcggtgttattataaactctcaacattggaataataccgtttgatataccattggtaccggagatatagcttccactggcacgaatattactaattgatagacctattccccctgccattttagagattaatgcgcatcgttttaacgtgtcatagataccctctatgctatcatcgatcatgttaagtagaaaacagctagacatttggtgacgactagttcccgcattaaataaggtaggagaagcgtgcgtaaaccatttttcagaaagtagattgtacgtctcaatagctgagtctatatcccattgatgaattcctactgcgacacgcattaacatgtgctgaggtctttcaacgatcttgttgtttattttcaacaagtaggatttttccaaagttttaaaaccaaaatagttgtatgaaaagtctcgttcgtaaataataaccgagttgagtttatccttatatttgttaactatatccatggtgatacttgaaataatcggagaatgtttcccatttttaggattaacatagttgaataaatcctccatcacttcactaaatagtttttttgtttccttgtgtagatttgatacggctattctggcggctagaatggcataatccggatgttgtgtagtacaagtggctgctatttcggctgccagagtgtccaattctaccgttgttactccattatatattccttgaataaccttcatagctattttaataggatctatatgatccgtgtttaagccataacataattttctaatacgagacgtgattttatcaaacatgacattttccttgtatccatttcgtttaatgacaaacatttttgttggtgtaataaaaaaattatttaacttttcattaatagggatttgacgtatgtagcgtacaaaatgattgttcctggtatatagataaagagtcctatatatttgaaaatcgttacggctcgattaaactttaatgattgcatagtgaatatatcattaggatttaactccttgactatcatggcggcgccagaaattaccatcaaaagcattaatacagttataccgatcgcagttagaacggttatagcatccaccatttatatctaaaaattagatcaaagaatatgtgacaaagtcctagttgtatactgagaattgacgaaacaatgtttcttacatatttttttcttattagtaaccgacttaatagtaggaactggaaaactagacttgattattctataagtatagatacccttccaaataatattctctttgataaaagttccagaaaatgtagaattttttaaaaagttatcttttgctattaccaagattgtgtttagacgcttattattaatatgagtgatgaaatccacaccgcctctagatatcgcctttatttccacattagatggtaaatccaatagtgaaactatctttttaggaatgtatggactcgcgtttagaggagtaaacgtcttaggcgtcggaaaggatgattcatcaaacgaataaacaatttcacaaatggatgttaatgtattagtaggaaattttttgacgctattggaattgaagattctaatggatgatgttctacctatttcatccgataacatgttaatttccgacaccaacggttttaatatttcgatgatatacggtagtctctctttcggacttatatagcttattccacaatacgagtcattatatactccaaaaaacaaaataactagtataaaatctgtatcgaatgggaaaaacgaaattatcgacataggtatagaatccggaacattgaacgtattaatacttaattctttttctgtggtaagtaccgataggttattgacattgtatggttttaaatattctataacttgagacttgatagatattagtgatgaattgaaaattatttttatcaccacgtgtgtttcaggatcatcgtcgacgcccgtcaaccaaccgaacggagtaaaataaatatcattaatatatgctctagatattagtatttttatcaatcctttgattatcatcttctcgtaggcgaatgattccatgatcaagagtgatttaagaacatcctccggagtattaatgggcttagtaaacagtccatcgttgcaataataaaagttatccaagttaaaggatattatgcattcgtttaaagatatcacctcatctgacggagacaattttttggtaggttttagagactttgaagctacttgtttaacaaagttattcatcgtcgtctactattctatttaattttgtagttaatttatcacatatcacattaattgactttttggtccacttttccatacgtttatattcttttaatcctgcgttatccgtttccgttatatccagggatagatcttgcaagttaaatagaatgctcttaaataatgtcattttcttatccgctaaaaatttaaagaatgtataaacctttttcagagatttgaaactcttaggtggtgtcctagtacacaatatcataaacaaactaataaacattccacattcagattccaacagctgattaacttccacattaatacagcctattttcgctccaaatgtacattcgaaaaatctgaataaaacatcgatgtcacaatttgtattatccaatacagaatgtttgtgattcgtgttaaaaccatcggagaaggaatagaaataaaaattattatagtggtggaattcagttggaatattgcctccggagtcataaaaggatactaaacattgttttttatcataaattacacatttccaatgagacaaataacaaaatccaaacattacaaatctagaggtagaacttttaattttgtctttaagtatatacgataagatatgtttattcataaacgcgtcaaatttttcatgaatcgctaaggagtttaagaatctcatgtcaaattgtcctatataatccacttcggatccataagcaaactgagagactaagttcttaatacttcgattgctcatccaggctcctctctcaggctctattttcatcttgacgacctttggattttcaccagtatgtattcctttacgtgataaatcatcgattttcaaatccatttgtgagaagtctatcgccttagatactttttcccgtagtcgaggtttaaaaaaatacgctaacggtatactagtaggtaactcaaagacatcatatatagaatggtaacgcgtctttaactcgtcggttaactctttcttttgatcgagttcgtcgctactattgggtctgctcaggtgccccgactctactagttccaacatcataccgataggaatacaagacactttgccggcggttgtagatttatcatatttttccactacatatccgttacaatttgttaaaaatttagatacatctatattgctacataatccagctagtgaatatatatgacataataaattggtaaatcctagttctggtattttactaattactaaatctgtatatctttccatttatcatggaaaagaatttaccagatatcttcttttttccaaactgcgttaatgtattctcttacaaatattcacaagatgaattcagtaatatgagtaaaacggaacgtgatagtttctcattggccgtgtttccagttataaaacatagatggcataacgcacacgttgtaaaacataaaggaatatacaaagttagtacagaagcacgtggaaaaaaagtatctcctccatcactaggaaaacccgcacacataaacctaaccgcgaagcaatatatatacagtgaacacacaataagctttgaatgttatagttttctaaaatgtataacaaatacagaaatcaattcgttcgatgagtatatattaagaggactattagaagctggtaatagtttacagatattttccaattccgtaggtaaacgaacagatactataggtgtactagggaataagtatccatttagcaaaattccattggcctcattaactcctaaagcacaacgagagatattttcagcgtggatttctcatagacctgtagttttaactggaggaactggagtgggtaagacgtcacaggtacccaagttattgctttggtttaattatttatttggtggattctctactctagataaaatcactgactttcacgaaagaccagtcattctatctcttcctaggatagctttagttagattgcatagcaataccattttaaaatcattgggatttaaggtactagatggatctcctatttctttacggtacggatctataccggaagaattaataaacaaacaaccaaaaaaatatggaattgtattttctacccataagttatctctaacaaaactatttagttatggcactcttattatagacgaagttcatgagcatgatcaaataggagatattattatagcagtagcgagaaagcatcatacgaaaatagattctatgtttttaatgactgccacgttagaggatgacagggaacggctaaaagtatttttacctaatcccgcatttatacatattcctggagatacactgtttaaaattagcgaggtatttattcataataagataaatccatcttccagaatggcatacatagaagaagaaaagagaaatttagttactgctatacagatgtatactcctcctgatggatcatccggtatagtctttgtggcatccgttgcacagtgtcacgaatataaatcatatttagaaaaaagattaccgtatgatatgtatattattcatggtaaggtcttagatatagacgaaatattagaaaaagtgtattcatcacctaatgtatcgataattatttctactccttatttggaatccagcgttactatacgcaatgttacacacatttatgatatgggtagagtttttgtccccgctccttttggaggatcgcaacaatttatttctaaatctatgagagatcaacgaaaaggaagagtaggaagagttaatcctggtacatacgtctatttctatgatctgtcttatatgaagtctatacagcgaatagattcagaatttctacataattatatattgtacgctaataagtttaatctaacactccccgaagatttgtttataatccctacaaatttggatattctatggcgtacaaaggaatatatagactcgttcgatattagtacagaaacatggaataaattattatccaattattatatgaagatgatagagtatgctaaactttatgtactaagtcctattctcgctgaggagttggataactttgagaggacgggagaattaactagtattgtacgagaagccattttatctctaaatttacaaattaagattttaaattttaaacataaagatgatgatacgtatatacacttttgtaaaatattattcggtgtctataacggaacaaacgctactatatattatcatagacctctaacgggatatatgaatatgatttcagatactatatttgttcctgtagataataactaaaaatcaaactctaatgaccacatctttttttagagatgaaaaattttccacatctccttttgtagacacgactaaacattttgcagaaaaaagtttattagtgtttagataatcgtatacttcatcagtgtagatagtaaatgtgaacagataaaaggtattcttgctcaatagattggtaaattccatagaatatattaatcctttcttcttgagatcccacatcatttcaaccagagacgttttatccaatgatttacctcgtactataccacatacaaaactagattttgcagtgacgtcgtacctggtattcctaccaaacaaaattttacttttagttcttttagaaaattctaaggtagaatctctatttgccaatatgtcatctatggaattaccactagcaaaaaatgatagaaatatatattgatacatcgcagctggttttgatctactatactttaaaaacgaatcagattccataattgcctgtatatcatcagctgaaaaactatgttttacacgtattccttcggcatttctttttaatgatatatcttgtttagacaatgataaagttatcatgtccatgagagacgcgtctccgtatcgtataaatatttcattagatgttagacgcttcattaggggtatacttctataaggtttcttaatcagtccatcattggttgcgtcaagaactactatcggatgttgttgggtatctctagtgttacacatggccttactaaagtttgggtaaataactatgatatctctattaattatagatgcatatatttcattcgtcaaggatattagtatcgacttgctatcgtcattaatacgtgtaatgtaatcatataaatcatgcgatagccaaggaaaatttaaatagatgttcatcatataatcgtcgctataattcatattaatacgttgacattgactaatttgtaatatagcctcgccacgaagaaagctctcgtattcagtttcatcgataaaggataccgttaaatataactggttgccgatagtctcatagtctattaagtggtaagtttcgtacaaatacagaatccctaaaatattatctaatgttggattaatctttaccataactgtataaaatggagacggagtcataactattttaccgtttgtacttactggaatagatgaaggaataatctccggacatgctggtaaagacccaaatgtctgtttgaagaaatccaatgttccaggtcctaatctcttaacaaaaattacgatattcgatcccgatatcctttgcattctatttaccagcatatcacgaactatattaagattatctatcatgtctattctcccaccgttatataaatcgcctccgctaagaaacgttagtatatccatacaatggaatacttcatttctaaaatagtattcgttttctaattctttaatgtgaaatcgtatactagaaagggaaaaattatctttgagttttccgttagaaaagaaccacgaaactaatgttctgattgcgtccgattccgttgctgaattaatggatttacaccaaaaactcatataacttctagatgtagaagcattcgctaaaaaattagtagaatcaaaggatataagtagatgttccaacaagtgagcaattcccaagatttcatctatatcattctcgaatccgaaattagaaattcccaagtagatatcctttttcatccgatcgttgatgaaaatacgaactttattcggtaagacaatcatttactaaggagtaaaataggaagtaatgttcgtatgtcgttatcatcgtataaattaaaggtgtgttttttaccattaagtgacattataattttaccaatattggaattataatataggtgtatttgcgcactcgcgacggttgatgcatcggtaaatatagctgtatctaatgttctagtcggtatttcatcatttcgctgtctaataatagcgttttctctatctgtttccattacagctgcctgaagtttattggtcggataatatgtaaaataataagaaatacatacgaataacaaaaataaaataagatataataaagatgccatttagagatctaattttgtttaacttgtccaaattcctacttacagaagatgaggaatcgttggagatagtgtcttccttatgtagaggatttgaaatatcttataatgacttgataacttactttccagataggaaataccataaatatatttataaagtatttgaacatgtagatttatcggaggaattaagtatggaattccatgatacaactctgagagatttagtctatcttagattgtacaagtattccaagtgtatacggccgtgttataaattaggagataatctaaaaggcatagttgttataaaggacaggaatatttatattagggaagcaaatgatgacttgatagaatatctcctcaaggaatacactcctcagatttatacatattctaatgagcgcgtccccataactggttcaaaattaattctttgtggattttctcaagttacatttatggcgtatacaacgtcgcatataacaacaaataaaaaggtagatgttctcgtttccaaaaaatgtatagatgaactagtcgatccaataaattatcaaatacttcaaaatttatttgataaaggaagcggaacaataaacaaaatactcaggaagatattttattcggtaacaggtggccaaactccataggtagctttttctatttcggattttagaatttccaaattcaccagcgatttatcggttttggtgaaatccaaggatttattaatgtccacaaatgccatttgttttgtctgtggattgtatttgaaaatggaaacgatgtagttagatagatgcgctgcgaagtttcctattagggttccgcgcttcacgtcacccagcatacttgaatcaccatcctttaaaaaaaatgataagatatcaacatggagtatatcatactcgaattttaattcttctactgactcactgacattttcacaaatactacaatacggtttaccgaaaataatcagtacgttcttcatttatgggtatcaaaaacttaaaatcgttactgctggaaaataaatcactgacgatattagatgataatttatacaaagtatacaatggaatatttgtggatacaatgagtatttatatagccgtcgccaattgtgtcagaaacttagaagagttaactacggtattcataaaatacgtaaacggatgggtaaaaaagggagggcatgtaaccctttttatcgatagaggaagtataaaaattaaacaagacgttagagacaagagacgtaaatattctaaattaaccaaggacagaaaaatgttagaattagaaaagtgtacatccgaaatacaaaatgttaccggatttatggaagaagaaataaaggcagaaatgcaattaaaaatcgataaactcacatttcaaatatatttatctgattctgataacataaaaatatcattgaatgagatactaacacatttcaacaataatgagaatgttacattattttattgtgatgaacgagacgcagaattcgttatgtgtctcgaggctaaaacacatttctctaccacaggagaatggccgttgataataagtaccgatcaggatactatgctatttgcatctgctgataatcatcctaagatgataaaaaacttaactcaactgtttaaatttgttccctcggcagaggataactatttagcaaaattaacggcgttagtgaatggatgtgatttctttcctggactctatggggcatctataacacccaccaacttaaacaaaatacaattgtttagtgattttacaatcgataatatagtcactagtttggcaattaaaaattattatagaaagactaactctaccgtagacgtgcgtaatattgttacgtttataaacgattacgctaatttagacgatgtctactcgtatattcctccttgtcaatgcactgttcaagaatttatattttccgcattagatgaaaaatggaatgaatttaaatcatcttatttagaaagcgtgccgttaccctgccaattaatgtacgcgttagaaccacgcaaggagattgatgtttcagaagttaaaactttatcatcttatatagatttcgaaaatactaaatcagatatcgatgttataaaatctatatcctcgatcttcggatattctaacgaaaactgtaacacgatagtattcggcatctataaggataatttactactgagtataaataattcattttactttaacgatagtctgttaataaccaatactaaaagtgataatataataaatataggttactagattaaaaatggtgttccaactcgtgtgctctacatgcggtaaagatatttctcacgaacgatataaattgattatacgaaaaaaatcattaaaggatgtactcgtcagtgtaaagaacgaatgttgtaggttaaaattatctacacaaatagaacctcaacgtaacttaacagtgcaacctctattggatataaactaatatggatccggttaattttatcaagacatatgcgcctagaggttctattatttttattaattataccatgtcattaacaagtcatttgaatccatcgatagaaaaacatgtgggtatttattatggtacgttattatcggaacacttggtagttgaatctacctatagaaaaggagttcgaatagtcccattggatagtttttttgaaggatatcttagtgcaaaagtatacatgttagagaatattcaagttatgaaaatagcagctgatacgtcattaactttattgggtattccgtatggatttggtcatgatagaatgtattgttttaaattggtagctgactgttataaaaatgccggtattgatacatcgtctaaacgaatattgggcaaagatatttttctgagccaaaacttcacagacgataatagatggataaagatatatgattctaataatttaacattttggcaaattgattaccttaaagggtgagttaatatgcataactactcctccgttgttttttccctcgttctttttcttaacgttgtttgccatcactctcataatgtaaagatattctaaaatggtaaacttttgcatatcggacgcagaaattggtataaatgttgtaattgtattatttcccgtcaatggactagtcacagctccatcagttttatatcctttagagtatttctcactcgtgtctaacattctagagcattccatgatctgtttatcgttgatattggccggaaagatagattttttattttttattatattactattggcaattgtagatataacttctggtaaatatttttctaccttttcaatctcttctattttcaagccggctatatattctgctatattgttgctagtatcaataccttttctggctaagaagtcatatgtggtattcactatatcagttttaactggtagttccattagcctttccacttctgcagaataatcagaaattggttctttaccagaaaatccagctactataataggctcaccgatgatcattggcaaaatcctatattgtaccagattaatgagagcatatttcatttccaataattctgctagttcttgagacattgatttatttgatgaatctagttggttctctagatactctaccatttctgccgcatacaataacttgttagataaaatcagggttatcaaagtgtttagcgtggctagaatagtgggcttgcatgtattaaagaatgcggtagtatgagtaaaccgttttaacgaattatatagtctccagaaatctgtggcgttacatacatgagccgaatgacatcgaagattgtccaatatttttaatagctgctctttgtccattatttctatatttgactcgcaacaattgtagataccattaatcaccgattcctttttcgatgccggacaatagcacaattgtttagctttggactctatgtattcagaattaatagatatatctctcaatacagattgcactatacattttgaaactatgtcaaaaattgtagaacgacgctgttctgcagccatttaactttaaataatttacaaaaatttaaaatgagcatccgtataaaaatcgataaactgcgccaaattgtggcatatttttcagagttcagtgaagaagtgtctataaatgtagactcgacggatgagttaatgtatatttttgccgccttgggcggatctgtaaacatttgggcaattatacctctaagtgcatcagtgttttaccgaggagccgaaaatattgtgtttaatcttcctgtgtccaaggtaaaatcgtgtttgtgtagttttcacaatgatgccatcatagatatagaacctgatctggaaaataatctagtaaaactttctagttatcatgtagtaagtgtcgattgtaacaaggaactgatgcctattaggacagatactactatttgtctaagtatagatcaaaagaaatcttacgtgtttaattttcacaagtatgaagaaaaatgttgtggtagaaccgtcattcatctagaatggttgttgggctttatcaagtgtattagtcagcatcagcatctggctattatgtttaaagatgacaatattattatgaagactcctggtaatactgatgcgttttccagggaatattctatgactgaatgttctcaagaactacaaaagttttctttcaaaatagctatctcgtctctcaacaaactacgaggattcaaaaagagagtcaatgtttttgaaactagaatcgtaatggataatgacgataacattttaggaatgttgttttcggatagagttcaatcctttaagatcaacatctttatggcgtttttagattaatactttcaatgagataaatatgggtggcggagtaagtgttgagctccctaaacgggatccgcctccgggagtacccactgatgagatgttattaaacgtggataaaatgcatgacgtgatagctcccgctaagcttttagaatatgtgcatataggaccactagcaaaagataaagaggataaagtaaagaaaagatatccagagtttagattagtcaacacaggacccggtggtctttcggcattgttaagacaatcgtataatggaaccgcacccaattgctgtcgcacttttaatcgtactcattattggaagaaggatggaaagatatcagataagtatgaagagggtgcagtattagaatcgtgttggccagacgttcacgacactggaaaatgcgatgttgatttattcgactggtgtcagggggatacgttcgatagaaacatatgccatcagtggatcggttcagcctttaataggagtaatagaactgtagagggtcaacaatcgttaataaatctgtataataagatgcaaacattatgtagtaaagatgctagtgtaccaatatgcgaatcatttttgcattatttacgcgcacacaatacagaagatagcaaagagatgatcgattatattctaagacaacagtctgcggactttaaacagaaatatatgagatgtagttatcccactagagataagttagaagagtcattaaaatatgcggaacctcgagaatgttgggatccagagtgttcgaatgccaatgttaatttcttactaacacgtaattataataatttaggactttgcaatattgtacgatgtaataccagcgtgaacaacttacagatggataaaacttcctcattaagattgtcatgtggattaagcaatagtgatagattttctactgttcccgtcaatagagcaaaagtagttcaacataatattaaacactcgttcgacctaaaattgcatttgatcagtttattatctctcttggtaatatggatactaattgtagctatttaaatgggtgccgcggcaagcatacagacgacggtgaatacactcagcgaacgtatctcgtctaaattagaacaagaagcgaacgctagtgctcaaacaaaatgtgatatagaaatcggaaatttttatatccgacaaaaccatggatgtaacctcactgttaaaaatatgtgctctgcggacgcggatgctcagttggatgctgtgttatcagccgctacagaaacatatagtggattaacaccggaacaaaaagcatacgtgccagctatgtttactgctgcgttaaacattcagacgagtgtaaacactgttgttagagattttgaaaattatgtgaaacagacttgtaattctagcgcggtcgtcgataacaaattaaagatacaaaacgtaatcatagatgaatgttacggagccccaggatctccaacaaatttggaatttattaatacaggatctagcaaaggaaattgtgccattaaagcgttgatgcaattgacgactaaggccactactcaaatagcacctagacaagttgctggtacaggagttcagttttatatgattgttatcggtgttataatattggcagcgttgtttatgtactatgccaagcgtatgttgttcacatccaccaatgataaaatcaaacttattttagccaataaggaaaacgtccattggactacttacatggacacattctttagaacttctccgatggttattgctaccacggatatgcaaaactgaaaatatattgataatattttaatagattaacatggaagttatcgctgatcgtctagacgatatagtgaaacaaaatatagcggatgaaaaatttgtagattttgttatacacggtctagagcatcaatgtcctgctatacttcgaccattaattaggttgtttattgatatactattatttgttatagtaatttatatttttacggtacgtctagtaagtagaaattatcaaatgttgttggtggtgctagtcatcacattaactattttttattactttatactataatagtactagactgacttctaacaaacatctcacctgccataaataaatgcttgatattaaagtcttctatttctaacactattccatctgtggaaaataatactctgacattatcgctaattgacacatcggtgagtgatatgcctataaagtaataatcttctttgggcacatataccagtgtaccaggttctaacaacctatttactggtgctcctgtagcatactttttctttaccttgagaatatccatcgtttgcttggtcaatagcgatatgtgattttttatcaaccactcaaaaaagtaattggagtgttcatatcctctacgggctattgtctcatggccgtgtatgaaatttaagtaacacgactgtggtagatttgttctatagagccgattgccgcaaatagatagaactaccaatatgtctgtacaaatgttaaacattaattgattaacagaaaaaacaatgttcgttctgggaatagaaaccagatcaaaacaaaattcgttagaatatatgccacgtttatacatggaatataaaataactacagtttgaaaaataacagtatcatttaaacatttaacttgcggggttaatctcacaactttactgtttttgaactgttcaaaatatagcatcgatccgtgagaaatacgtttagccgcctttaatagaggaaatcccaccgcctttctggatctcaccaacgacgatagttctgaccagcaactcatttcttcatcatccacctgttttaacatataataggcaggagatagatatccgtcattgcaatattccttctcgtaggcacacaatctaatattgataaaatctccattctcttctctgcatttattatcttgtctcggtggctgattaggctgtggtcttggtttaggccttggtctatcgttgttgaatctattttggtcattaaatctttcatttcttcctggtatatttctatcacctcgtttggttggatttttgtctatattatcgtttgtaacatcggtacgggtattcatttatcacaaaaaaaacttctctaaatgagtctactgctagaaaacctcatcgaagaagataccatattttttgcaggaagtatatctgagtatgatgatttacaaatggttattgccggcgcaaaatccaaatttccaagatctatgctttctatttttaatatagtacctagaacgatgtcaaaatatgagttggagttgattcataacgaaaatatcacaggagcaatgtttaccacaatgtataatataagaaacaatttgggtctaggagatgataaactaactattgaagccattgaaaactatttcttggatcctaacaatgaagttatgcctcttattattaataatacggatatgactgccgtcattcctaaaaaaagtggtaggagaaagaataagaacatggttatcttccgtcaaggatcatcacctatcttgtgcattttcgaaactcgtaaaaagattaatatttataaagaaaatatggaatccgcgtcgactgagtatacacctatcggagacaacaaggctttgatatctaaatatgcgggaattaatgtcctgaatgtgtattctccttccacatccataagattgaatgccatttacggattcaccaataaaaataaactagagaaacttagtactaataaggaactagaatcgtatagttctagccctcttcaagaacccattaggttaaatgattttctgggactattggaatgtgttaaaaagaatattcctctaacagatattccgacaaaggattgattactataaatggagaatgttcctaatgtatactttaatcctgtgtttatagagcccacgtttaaacattctttattaagtgtttataaacacagattaatagttttatttgaagtattcgttgtattcattctaatatatgtattttttagatctgaattaaatatgttcttcatgcctaaacgaaaaatacccgatcctattgatagattacgacgtgctaatctagcgtgtgaagacgataaattaatgatctatggattaccatggatgacaactcaaacatctgcgttatcaataaatagtaaaccgatagtgtataaagattgtgcaaagcttttgcgatcaataaatggatcacaaccagtatctcttaacgatgttcttcgcagatgatgattcattttttaagtatttggctagtcaagatgatgaatcttcattatctgatatattgcaaatcactcaatatctagactttctgttattattattgatccaatcaaaaaataaattagaagctgtgggtcattgttatgaatctctttcagaggaatacagacaattgacaaaattcacagactttcaagattttaaaaaactgtttaacaaggtccctattgttacagatggaagggtcaaacttaataaaggatatttgttcgactttgtgattagtttgatgcgattcaaaaaagaatcctctctagctaccaccgcaatagatcctgttagatacatagatcctcgtcgcaatatcgcattttctaacgtgatggatatattaaagtcgaataaagtgaacaataattaattctttattgtcatcatgaacggcggacatattcagttgataatcggccccatgttttcaggtaaaagtacagaattaattagacgagttagacgttatcaaatagctcaatataaatgcgtgactataaaatattctaacgataatagatacggaacgggactatggacgcatgataagaataattttgaagcattggaagcaactaaactatgtgatgtcttggaatcaattacagatttctccgtgataggtatcgatgaaggacagttctttccagacattgttgaattagatcgataaaaattaattaattacccgggtaccaggcctagatctgtcgagatccggtggtggtgcaaatcaaagaactgctcctcagtggatgttgcctttacttctaggcctgtacggaagtgttacttctgctctaaaagctgctgcagggggggggggggggtgggggggccggttagggccgccatcccctcagagcgtcgggatatcgggtggcggctcgggacggaggacgcgctagtgttcttctgtgtggcagttcagaatgatggatcaagctagatcagcattctctaacttgtttggtggagaaccattgtcatatacccggttcagcctggctcggcaagtagatggcgataacagtcatgtggagatgaaacttgctgtagatgaagaagaaaatgctgacaataacacaaaggccaatgtcacaaaaccaaaaaggtgtagtggaagtatctgctatgggactattgctgtgatcgtctttttcttgattggatttatgattggctacttgggctattgtaaaggggtagaaccaaaaactgagtgtgagagactggcaggaaccgagtctccagtgagggaggagccaggagaggacttccctgcagcacgtcgcttatattgggatgacctgaagagaaagttgtcggagaaactggacagcacagacttcaccagcaccatcaagctgctgaatgaaaattcatatgtccctcgtgaggctggatctcaaaaagatgaaaatcttgcgttgtatgttgaaaatcaatttcgtgaatttaaactcagcaaagtctggcgtgatcaacattttgttaagattcaggtcaaagacagcgctcaaaactcggtgatcatagttgataagaacggtagacttgtttacctggtggagaatcctgggggttatgtggcgtatagtaaggctgcaacagttactggtaaactggtccatgctaattttggtactaaaaaagattttgaggatttatacactcctgtgaatggatctatagtgattgtcagagcagggaaaatcacctttgcagaaaaggttgcaaatgctgaaagcttaaatgcaattggtgtgttgatatacatggaccagactaaatttcccattgttaacgcagaactttcattctttggacatgctcatctggggacaggtgacccttacacacctggattcccttccttcaatcacactcagtttccaccatctcggtcatcaggattgcctaatatacctgtccagacaatctccagagctgctgcagaaaagctgtttgggaatatggaaggagactgtccctctgactggaaaacagactctacatgtaggatggtaacctcagaaagcaagaatgtgaagctcactgtgagcaatgtgctgaaagagataaaaattcttaacatctttggagttattaaaggctttgtagaaccagatcactatgttgtagttggggcccagagagatgcatggggccctggagctgcaaaatccggtgtaggcacagctctcctattgaaacttgcccagatgttctcagatatggtcttaaaagatgggtttcagcccagcagaagcattatctttgccagttggagtgctggagactttggatcggttggtgccactgaatggctagagggatacctttcgtccctgcatttaaaggctttcacttatattaatctggataaagcggttcttggtaccagcaacttcaaggtttctgccagcccactgttgtatacgcttattgagaaaacaatgcaaaatgtgaagcatccggttactgggcaatttctatatcaggacagcaactgggccagcaaagttgagaaactcactttagacaatgctgctttccctttccttgcatattctggaatcccagcagtttctttctgtttttgcgaggacacagattatccttatttgggtaccaccatggacacctataaggaactgattgagaggattcctgagttgaacaaagtggcacgagcagctgcagaggtcgctggtcagttcgtgattaaactaacccatgatgttgaattgaacctggactatgagaggtacaacagccaactgctttcatttgtgagggatctgaaccaatacagagcagacataaaggaaatgggcctgagtttacagtggctgtattctgctcgtggagacttcttccgtgctacttccagactaacaacagatttcgggaatgctgagaaaacagacagatttgtcatgaagaaactcaatgatcgtgtcatgagagtggagtatcacttcctctctccctacgtatctccaaaagagtctcctttccgacatgtcttctggggctccggctctcacacgctgccagctttactggagaacttgaaactgcgtaaacaaaataacggtgcttttaatgaaacgctgttcagaaaccagttggctctagctacttggactattcagggagctgcaaatgccctctctggtgacgtttgggacattgacaatgagttttaaatgtgatacccatagcttccatgagaacagcagggtagtctggtttctagacttgtgctgatcgtgctaaattttcagtagggctacaaaacctgatgttaaaattccatcccatcatcttggtactactagatgtctttaggcagcagcttttaatacagggtagataacctgtacttcaagttaaagtgaataaccacttaaaaaatgtccatgatggaatattcccctatctctagaattttaagtgctttgtaatgggaactgcctctttcctgttgttgttaatgaaaatgtcagaaaccagttatgtgaatgatctctctgaatcctaagggctggtctctgctgaaggttgtaagtggtcgcttactttgagtgatcctccaacttcatttgatgctaaataggagataccaggttgaaagaccttctccaaatgagatctaagcctttccataaggaatgtagctggtttcctcattcctgaaagaaacagttaactttcagaagagatgggcttgttttcttgccaatgaggtctgaaatggaggtccttctgctggataaaatgaggttcaactgttgattgcaggaataaggccttaatatgttaacctcagtgtcatttatgaaaagaggggaccagaagccaaagacttagtatattttcttttcctctgtcccttcccccataagcctccatttagttctttgttatttttgtttcttccaaagcacattgaaagagaaccagtttcaggtgtttagttgcagactcagtttgtcagactttaaagaataatatgctgccaaattttggccaaagtgttaatcttaggggagagctttctgtccttttggcactgagatatttattgtttatttatcagtgacagagttcactataaatggtgtttttttaatagaatataattatcggaagcagtgccttccataattatgacagttatactgtcggttttttttaaataaaagcagcatctgctaataaaacccaacagatactggaagttttgcatttatggtcaacacttaagggttttagaaaacagccgtcagccaaatgtaattgaataaagttgaagctaagatttagagatgaattaaatttaattaggggttgctaagaagcgagcactgaccagataagaatgctggttttcctaaatgcagtgaattgtgaccaagttataaatcaatgtcacttaaaggctgtggtagtactcctgcaaaattttatagctcagtttatccaaggtgtaactctaattcccattttgcaaaatttccagtacctttgtcacaatcctaacacattatcgggagcagtatcttccataatgtataaagaacaaggtagtttttacctaccacagtgtctgtatcggagacagtgatctccatatgttacactaagggtgtaagtaattatcgggaacagtgtttcccataattttcttcatgcaatgacatcttcaaagcttgaagatcgttagtatctaacatgtatcccaactcctataattccctatcttttagttttagttgcagaaacattttgtggtcattaagcattgggtgggtaaattcaaccactgtaaaatgaaattactacaaaatttgaaatttagcttgggtttttgttacctttatggtttctccaggtcctctacttaatgagatagtagcatacatttataatgtttgctattgacaagtcattttaactttatcacattatttgcatgttacctcctataaacttagtgcggacaagttttaatccagaattgaccttttgacttaaagcagagggactttgtatagaaggtttgggggctgtggggaaggagagtcccctgaaggtctgacacgtctgcctacccattcgtggtgatcaattaaatgtaggtatgaataagttcgaagctccgtgagtgaaccatcattataaacgtgatgatcagctgtttgtcatagggcagttggaaacggcctcctagggaaaagttcatagggtctcttcaggttcttagtgtcacttacctagatttacagcctcacttgaatgtgtcactactcacagtctctttaatcttcagttttatctttaatctcctcttttatcttggactgacatttagcgtagctaagtgaaaaggtcatagctgagattcctggttcgggtgttacgcacacgtacttaaatgaaagcatgtggcatgttcatcgtataacacaatatgaatacagggcatgcattttgcagcagtgagtctcttcagaaaacccttttctacagttagggttgagttacttcctatcaagccagtacgtgctaacaggctcaatattcctgaatgaaatatcagactagtgacaagctcctggtcttgagatgtcttctcgttaaggagatgggccttttggaggtaaaggataaaatgaatgagttctgtcatgattcactattctagaacttgcatgacctttactgtgttagctctttgaatgttcttgaaattttagactttctttgtaaacaaatgatatgtccttatcattgtataaaagctgttatgtgcaacagtgtggagattccttgtctgatttaataaaatacttaaacactgaaaaaaaaaaaaaaaaaaaaaaaaaaaaaaaaaaaaaaaaaaaaaaaaaaaaaaaaaaaaaaaaaaaaaaaaaaaaaaaaagtaccttctgaggcggaaagaaccagccggatctcgacttcgagcttatttatattccaaaaaaaaaaaataaaatttcaatttttaagctttcactaattccaaacccacccgctttttatagtaagtttttcacccataaataataaatacaataattaatttctcgtaaaagtagaaaatatattctaatttattgcacggtaaggaagtagatcataactcgagcatgggagatcccgtcgttttacaacgtcgtgactgggaaaaccctggcgttacccaacttaatcgccttgcagcacatccccctttcgccagctggcgtaatagcgaagaggcccgcaccgatcgcccttcccaacagttgcgcagcctgaatggcgaatggcgctttgcctggtttccggcaccagaagcggtgccggaaagctggctggagtgcgatcttcctgaggccgatactgtcgtcgtcccctcaaactggcagatgcacggttacgatgcgcccatctacaccaacgtgacctatcccattacggtcaatccgccgtttgttcccacggagaatccgacgggttgttactcgctcacatttaatgttgatgaaagctggctacaggaaggccagacgcgaattatttttgatggcgttaactcggcgtttcatctgtggtgcaacgggcgctgggtcggttacggccaggacagtcgtttgccgtctgaatttgacctgagcgcatttttacgcgccggagaaaaccgcctcgcggtgatggtgctgcgctggagtgacggcagttatctggaagatcaggatatgtggcggatgagcggcattttccgtgacgtctcgttgctgcataaaccgactacacaaatcagcgatttccatgttgccactcgctttaatgatgatttcagccgcgctgtactggaggctgaagttcagatgtgcggcgagttgcgtgactacctacgggtaacagtttctttatggcagggtgaaacgcaggtcgccagcggcaccgcgcctttcggcggtgaaattatcgatgagcgtggtggttatgccgatcgcgtcacactacgtctgaacgtcgaaaacccgaaactgtggagcgccgaaatcccgaatctctatcgtgcggtggttgaactgcacaccgccgacggcacgctgattgaagcagaagcctgcgatgtcggtttccgcgaggtgcggattgaaaatggtctgctgctgctgaacggcaagccgttgctgattcgaggcgttaaccgtcacgagcatcatcctctgcatggtcaggtcatggatgagcagacgatggtgcaggatatcctgctgatgaagcagaacaactttaacgccgtgcgctgttcgcattatccgaaccatccgctgtggtacacgctgtgcgaccgctacggcctgtatgtggtggatgaagccaatattgaaacccacggcatggtgccaatgaatcgtctgaccgatgatccgcgctggctaccggcgatgagcgaacgcgtaacgcgaatggtgcagcgcgatcgtaatcacccgagtgtgatcatctggtcgctggggaatgaatcaggccacggcgctaatcacgacgcgctgtatcgctggatcaaatctgtcgatccttcccgcccggtgcagtatgaaggcggcggagccgacaccacggccaccgatattatttgcccgatgtacgcgcgcgtggatgaagaccagcccttcccggctgtgccgaaatggtccatcaaaaaatggctttcgctacctggagagacgcgcccgctgatcctttgcgaatacgcccacgcgatgggtaacagtcttggcggtttcgctaaatactggcaggcgtttcgtcagtatccccgtttacagggcggcttcgtctgggactgggtggatcagtcgctgattaaatatgatgaaaacggcaacccgtggtcggcttacggcggtgattttggcgatacgccgaacgatcgccagttctgtatgaacggtctggtctttgccgaccgcacgccgcatccagcgctgacggaagcaaaacaccagcagcagtttttccagttccgtttatccgggcaaaccatcgaagtgaccagcgaatacctgttccgtcatagcgataacgagctcctgcactggatggtggcgctggatggtaagccgctggcaagcggtgaagtgcctctggatgtcgctccacaaggtaaacagttgattgaactgcctgaactaccgcagccggagagcgccgggcaactctggctcacagtacgcgtagtgcaaccgaacgcgaccgcatggtcagaagccgggcacatcagcgcctggcagcagtggcgtctggcggaaaacctcagtgtgacgctccccgccgcgtcccacgccatcccgcatctgaccaccagcgaaatggatttttgcatcgagctgggtaataagcgttggcaatttaaccgccagtcaggctttctttcacagatgtggattggcgataaaaaacaactgctgacgccgctgcgcgatcagttcacccgtgcaccgctggataacgacattggcgtaagtgaagcgacccgcattgaccctaacgcctgggtcgaacgctggaaggcggcgggccattaccaggccgaagcagcgttgttgcagtgcacggcagatacacttgctgatgcggtgctgattacgaccgctcacgcgtggcagcatcaggggaaaaccttatttatcagccggaaaacctaccggattgatggtagtggtcaaatggcgattaccgttgatgttgaagtggcgagcgatacaccgcatccggcgcggattggcctgaactgccagctggcgcaggtagcagagcgggtaaactggctcggattagggccgcaagaaaactatcccgaccgccttactgccgcctgttttgaccgctgggatctgccattgtcagacatgtataccccgtacgtcttcccgagcgaaaacggtctgcgctgcgggacgcgcgaattgaattatggcccacaccagtggcgcggcgacttccagttcaacatcagccgctacagtcaacagcaactgatggaaaccagccatcgccatctgctgcacgcggaagaaggcacatggctgaatatcgacggtttccatatggggattggtggcgacgactcctggagcccgtcagtatcggcggaattccagctgagcgccggtcgctaccattaccagttggtctggtgtcaaaaataataataaccgggcaggggggatccaattctgtgagcgtatggcaaacgaaggaaaaatagttatagtagccgcactcgatgggacatttcaacgtaaaccgtttaataatattttgaatcttattccattatctgaaatggtggtaaaactaactgctgtgtgtatgaaatgctttaaggaggcttccttttctaaacgattgggtgaggaaaccgagatagaaataataggaggtaatgatatgtatcaatcggtgtgtagaaagtgttacatcgactcataatattatattttttatctaaaaaactaaaaataaacattgattaaattttaatataatacttaaaaatggatgttgtgtcgttagataaaccgtttatgtattttgaggaaattgataatgagttagattacgaaccagaaagtgcaaatgaggtcgcaaaaaaactgccgtatcaaggacagttaaaactattactaggagaattattttttcttagtaagttacagcgacacggtatattagatggtgccaccgtagtgtatataggatctgctcccggtacacatatacgttatttgagagatcatttctataatttaggagtgatcatcaaatggatgctaattgacggccgccatcatgatcctattttaaatggattgcgtgatgtgactctagtgactcggttcgttgatgaggaatatctacgatccatcaaaaaacaactgcatccttctaagattattttaatttctgatgtgagatccaaacgaggaggaaatgaacctagtacggcggatttactaagtaattacgctctacaaaatgtcatgattagtattttaaaccccgtggcgtctagtcttaaatggagatgcccgtttccagatcaatggatcaaggacttttatatcccacacggtaataaaatgttacaaccttttgctccttcatattcagctgaaatgagattattaagtatttataccggtgagaacatgagactgactcgagttaccaaattagacgctgtaaattatgaaaaaaagatgtactaccttaataagatcgtccgtaacaaagtagttgttaactttgattatcctaatcaggaatatgactattttcacatgtactttatgctgaggaccgtgtactgcaataaaacatttcctactactaaagcaaaggtactatttctacaacaatctatatttcgtttcttaaatattccaacaacatcaactgaaaaagttagtcatgaaccaatacaacgtaaaatatctagcaaaaattctatgtctaaaaacagaaatagcaagagatccgtacgcggtaataaatagaaacgtactactgagatatactaccgatatagagtataatgatttagttactttaataaccgttagacataaaattgattctatgaaaactgtgtttcaggtatttaacgaatcatccataaattatactccggttgatgatgattatggagaaccaatcattataacatcgtatcttcaaaaaggtcataacaagtttcctgtaaattttctatacatagatgtggtaatatctgacttatttcctagctttgttagactagatactacagaaactaatatagttaatagtgtactacaaacaggcgatggtaaaaagactcttcgtcttcccaaaatgttagagacggaaatagttgtcaagattctctatcgccctaatataccattaaaaattgttagatttttccgcaataacatggtaactggagtagagatagccgatagatctgttatttcagtcgctgattaatcaattagtagagatgagataagaacattataataatcaataatatatcttatatcttatatcttatatcttatatcttgtttagaaaaatgctaatattaaaatagctaacgctagtaatccaatcggaagccatttgatatctataatagggtatctaatttcctgatttaaatagcggacagctatattctcggtagctactcgtttggaatcacaaacattatttacatctaatttactatctgtaatggaaacgtttcccaatgaaatggtacaatccgatacattgcattttgttatatttttttttaaagaggctggtaacaacgcatcgcttcgtttacatggctcgtaccaacaataatagggtaatcttgtatctattcctatccgtactatgcttttatcaggataaatacatttacatcgtatatcgtctttgttagcatcacagaatgcataaatttgttcgtccgtcatgataaaaatttaaagtgtaaatataactattatttttatagttgtaataaaaagggaaatttgattgtatactttcggttctttaaaagaaactgacttgataaaaatggctgtaatctctaaggttacgtatagtctatatgatcaaaaagagattaatgctacagatattatcattagtcatgttaaaaatgacgacgatatcggtaccgttaaagatggtagactaggtgctatggatggggcattatgtaagacttgtgggaaaacggaattggaatgtttcggtcactggggtaaagtaagtatttataaaactcatatagttaagcctgaatttatttcagaaattattcgtttactgaatcatatatgtattcactgcggattattgcgttcacgagaaccgtattccgacgatattaacctaaaagagttatcgggacacgctcttaggagattaaaggataaaatattatccaagaaaaagtcatgttggaacagtgaatgtatgcaaccgtatcaaaaaattactttttcaaagaaaaaggtttgtttcgtcaacaagttggatgatattaacgttcctaattctctcatctatcaaaagttaatttctattcatgaaaagttttggccattattagaaattcatcaatatccagctaacttattttatacagactactttcccatccctccgttgattattagaccggctattagtttttggatagatagtatacccaaagagaccaatgaattaacttacttattaggtatgatcgttaagaattgtaacttgaatgctgatgaacaggttatccagaaggcggtaatagaatacgatgatattaaaattatttctaataacactaccagtatcaatttatcatatattacatccggcaaaaataatatgattagaagttatatcgtcgcccgacgaaaagatcagaccgctagatctgtaattggtcccagtacatctatcaccgttaatgaggtaggaatgcccgcatatattagaaatacacttacagaaaagatatttgttaatgcctttacagtggataaagttaaacaactattagcgtcaaaccaagttaaattttactttaataaacgattaaaccaattaacaagaatacgccaaggaaagtttattaaaaataaaatacatttattgcctggtgattgggtagaagtagctgttcaagaatatacaagtattatttttggaagacagccgtctctacatagatacaacgtcatcgcttcatctatcagagctaccgaaggagatactatcaaaatatctcccggaattgccaactctcaaaatgctgatttcgacggggatgaggaatggatgatattagaacaaaatcctaaagctgtaattgaacaaagtattcttatgtatccgacgacgttactcaaacacgatattcatggagcccccgtttatggatctattcaagatgaaatcgtagcagcgtattcattgtttaggatacaagatctttgtttagatgaagtattgaacatcttggggaaatatggaagagagttcgatcctaaaggtaaatgtaaattcagcggtaaagatatctatacttacttgataggtgaaaagattaattatccgggtctcttaaaggatggtgaaattattgcaaacgacgtagatagtaattttgttgtggctatgaggcatctgtcattggctggactcttatccgatcataagtcgaacgtggaaggtatcaactttattatcaagtcatcttatgtttttaagagatatctatctatttacggttttggggtgacattcaaagatctgagaccaaattcgacgttcactaataaattggaggccatcaacgtagaaaaaatagaacttatcaaagaagcatacgccaaatatctcaacgatgtaagagacgggaaaatagttccattatctaaagctttagaggcggactatgtggaatccatgttatccaacttgacaaatcttaatatccgagagatagaagaacatatgagacaaacgctgatagatgatccagataataacctcctgaaaatggccaaagcgggttataaagtaaatcccacagaactaatgtatattctaggtacgtatggacaacaaaggattgatggtgaaccagcagagactcgagtattgggtagagttttaccttactatcttccagactctaaggatccagaaggaagaggttacattcttaattctttaacaaaaggattaacgggttctcaatattacttttcgatgctggttgccagatctcaatctactgatatcgtctgtgaaacatcacgtaccggaacactggctagaaaaatcattaaaaagatggaggatatggtggtcgacggatacggacaagtagttataggtaatacgctcatcaagtacgccgccaattataccaaaattctaggctcagtatgtaaacctgtagatcttatctatccagatgagtccatgacttggtatttggaaattagtgctctgtggaataaaataaaacagggattcgtttactctcagaaacagaaacttgcaaagaagacattggcgccgtttaatttcctagtattcgtcaaacccaccactgaggataatgctattaaggttaaggatctgtacgatatgattcataacgtcattgatgatgtgagagagaaatacttctttacggtatctaatatagattttatggagtatatattcttgacgcatcttaatccttctagaattagaattacaaaagaaacggctatcactatctttgaaaagttctatgaaaaactcaattatactctaggtggtggaactcctattggaattatttctgcacaggtattgtctgagaagtttacacaacaagccctgtccagttttcacactactgaaaaaagtggtgccgtcaaacaaaaacttggtttcaacgagtttaataacttgactaatttgagtaagaataagaccgaaattatcactctggtatccgatgatatctctaaacttcaatctgttaagattaatttcgaatttgtatgtttgggagaattaaatccaaacatcactcttcgaaaagaaacagataaatatgtagtagatataatagtcaatagattatacatcaagagagcagaaataaccgaattagtcgtcgaatatatgattgaacgatttatctcctttagcgtcattgtaaaggaatggggtatggagacattcattgaggacgaggataatattagatttactgtctacctaaatttcgttgaaccggaagaattgaatcttagtaagtttatgatggttcttccgggggcagccaacaagggaaagattagtaaattcaagattcctatctctgattatacgggatatgacgacttcaatcaaacaaaaaagctcaataagatgactgtagaactcatgaatctaaaagaattgggttctttcgatttggaaaacgtcaacgtgtatcctggagtatggaatacatacgatatcttcggtatcgaggccgctcgtgaatacttgtgcgaagccatgttaaacacctatggagaagggttcgattatctgtatcagccttgtgatcttctcgctagtttactatgtgctagttacgaaccagaatcagtgaataaattcaagttcggcgcagctagtactcttaagagagctacgttcggagacaataaagcattgttaaacgcggctcttcataaaaagtcagaacctattaacgataatagtagctgccacttttttagcaaggtccctaatataggaactggatattacaaatactttatcgacttgggtcttctcatgagaatggaaaggaaactatctgataagatatcttctcaaaagatcaaggaaatggaagaaacagaagacttttaattcttatcaataacatatttttctatgatctgtcttttaaacgatggattttccacaaatgcgcctctcaagtccctcatagaatgatacacgtataaaaaatatagcataggcaatgactccttatttttagacattagatatgccaaaatcatagccccgcttctatttactcccgcagcacaatgaaccaacacgggctcgtttcgttgatcacatttagataaaaaggcggttacgtcgtcaaaatatttactaatatcggtagttgtatcatctaccaacggtatatgaataatattaatattagagttaggtaatgtatatttatccatcgtcaaatttaaaacatatttgaacttaacttcagatgatggtgcatccatagcatttttataatttcccaaatacacattattggttacccttgtcattatagtgggagatttggctttgtgcatatctccagttgaacgtagtagtaagtatttatacaaacttttcttatccatttataacgtacaaatggataaaactactttatcggtaaacgcgtgtaatttagaatacgttagagaaaaggctatagtaggcgtacaagcagccaaaacatcaacacttatattctttgttattatattggcaattagtgcgctattactctggtttcagacgtctgataatccagtctttaatgaattaacgagatatatgcgaattaaaaatacggttaacgattggaaatcattaacggatagcaaaacaaaattagaaagtgatagaggtagacttctagccgctggtaaggatgatatatttgaattcaaatgtgtggatttcggcgcctattttatagctatgcgattggataagaaaacatatctgccgcaagctattaggcgaggtactggagacgcgtggatggttaaaaaggcggcaaaggtcgatccatctgctcaacaattttgtcagtatttgataaaacacaagtctaataatgttattacttgtggtaatgagatgttaaatgaattaggttatagcggttattttatgtcaccgcattggtgttccgattttagtaatatggaatagtgttagataaatgcggtaacgaatgttcctgtaaggaaccataacagcttagatttaacgttaaagatgagcataaacataataaacaaaattacaatcaaacttataacattaatatcaaacaatccaaaaaatgaaatcagtggagtagtaaacgcgtacataactcctggataacgtttagcagctgccgttcctattctagaccaaaaattcggtttcatgttttcgaaacggtattctgcaacaagtcgaggatcgtgttctacatatttggcggcattatccagtatctgcctattgatcttcatttcgttttcgattctggctatttcaaaataaaatcccgatgatagacctccagactttataatttcatctacgatgttcagcgccgtagtaactctaataatataggctgataagctaacatcataccctcctgtatatgtgaatatggcatgatttttgtccattacaagctcggttttaactttattgcctgtaataatttctctcatctgtaggatatctatttttttgtcatgcattgccttcaagacgggacgaagaaacgtaatatcctcaataacgttatcgttttctacaataactacatattctacctttttattttctaactcggtaaaaaaattagaatcccatagggctaaatgtctagcgatatttcttttcgtttcctctgtacacatagtgttacaaaaccctgaaaagaagtgagtatacttgtcatcatttctaatgtttcctccagtccactgtataaacgcataatccttgtaatgatctggatcatccttgactaccacaacatttcttttttctggcataacttcgttgtcctttacatcatcgaacttctgatcattaatatgctcatgaacattaggaaatgtttctgatggaggtctatcaataactggcacaacaataacaggagttttcaccgccgccatttagttattgaaattaatcatatacaactctttaatacgagttatattttcgtctatccattgtttcacattgacatatttcgacaaaaagatataaaatgcgtattccaatgcttctctgtttaatgaattactaaaatatacaaacacgtcactgtctggcaataaatgatatcttagaatattgtaacaatttattttgtattgcacatgttcgtgatctatgagttcttcttcgaatggcataggatctccgaatctgaaaacgtataaataggagttagaataataatatttgagagtattggtaatatataaactctttagcggtataattagtttttttctctcaatttctatttttagatgtgatggaaaaatgactaattttgtagcattagtatcatgaactctaatcaaaatcttaatatcttcgtcacacgttagctctttgaagtttttaagagatgcatcagttggttctacagatggagtaggtgcaacaattttttgttctacacatgtatgtactggagccattgttttaactataatggtgcttgtatcgaaaaactttaatgcagatagcggaagctcttcgccgcgactttctacgtcgtaattgggttctaacgccgatctctgaatggatactagttttctaagttctaatgtgattctctgaaaatgtaaatccaattcctccggcattatagatgtgtatacatcggtaaataaaactatagtatccaacgatcccttctcgcaaattctagtcttaaccaaaaaatcgtatataaccacggagatggcgtatttaagagtggattcttctaccgttttgttcttggatgtcatataggaaactataaagtccgcactactgttaagaatgattactaacgcaactatatagtttaaattaagcattttggaaacataaaataactctgtagacgatacttgactttcgaataagtttgcagacaaacgaagaaagaacagacctctcttaatttcagaagaaaactttttttcgtattcctgacgtctagagtttatatcaataagaaagttaagaattagtcggttaatgttgtatttcattacccaagtttgagatttcataatattatcaaaagacatgataatattaaagataaagcgctgactatgaacgaaatagctatatggttcgctcaagaatatagtcttgttaaacgtggaaacgataactgtatttttaatcacgtcagcggcatctaaattaaatataggtatatttattccacacactctacaatatgccacaccatcttcataataaataaattcgttagcaaaattattaattttagtgaaatagttagcgtcaactttcatagcttccttcaatctaatttgatgctcacacggtgcgaattccactctaacatcccttttccatgcctcaggttcatcgatctctataatatctagttttttgcgtttcacaaacacaggctcgtctctcgcgatgagatctgtatagtaactatgtaaatgataactagatagaaagatgtagctatatagatgacgatcctttaagagaggtataataactttaccccaatcagatagactgttgttatggtcttcggaaaaagaatttttataaatttttccagtattttccaaatatacgtacttaacatctaaaaaatccttaatgataataggaatggataatccgtctattttataaagaaatacatatcgcacattatacttttttttggaaatgggaataccgatgtgtctacataaatatgcaaagtctaaatattttttagagaatcttagttggtccaaattcttttccaagtacggtaatagatttttcatattgaacggtatcttcttaatctctggttctagttccgcattaaatgatgaaactaagtcactatttttataactaacgattacatcacctctaacatcatcatttaccagaatactgatcttcttttgtcgtaaatacatgtctaatgtgttaaaaaaaagatcatacaagttatacgtcatttcatctgtggtattcttgtcattgaaggataaactcgtactaatctcttctttaacagcctgttcaaatttatatcctatatacgaaaaaatagcaaccagtgtttgatcatccgcgtcaatattctgttctatcgtagtgtataacaatcgtatatcttcttctgtgatagtcgatacgttataaaggttgataacgaaaatatttttatttcgtgaaataaagtcatcgtaggattttggacttatattcgcgtctagtagatatgcttttatttttggaatgatctcaattagaatagtctctttagagtccatttaaagttacaaacaactaggaaattggtttatgatgtataatttttttagtttttatagattctttattctatacttaaaaaatgaaaataaatacaaaggttcttgagggttgtgttaaattgaaagcgagaaataatcataaattatttcattatcgcgatatccgttaagtttgtatcgtaatggcgtggtcaattacgaataaagcggatactagtagcttcacaaagatggctgaaatcagagctcatctaaaaaatagcgctgaaaataaagataaaaacgaggatattttcccggaagatgtaataattccatctactaagcccaaaaccaaacgagccactactcctcgtaaaccagcggctactaaaagatcaaccaaaaaggaggaagtggaagaagaagtagttatagaggaatatcatcaaacaactgaaaaaaattctccatctcctggagtcagcgacattgtagaaagcgtggccgctgtagagctcgatgatagcgacggggatgatgaacctatggtacaagttgaagctggtaaagtaaatcatagtgctagaagcgatctctctgacctaaaggtggctaccgacaatatcgttaaagatcttaagaaaattattactagaatctctgcagtatcgacggttctagaggatgttcaagcagctggtatctctagacaatttacttctatgactaaagctattacaacactatctgatctagtcaccgagggaaaatctaaagttgttcgtaaaaaagttaaaacttgtaagaagtaaatgcgtgcacttttttataaagatggtaaactctttaccgataataattttttaaatcctgtatcagacgataatccagcgtatgaggttttgcaacatgttaaaattcctactcatttaacagatgtagtagtatatgaacaaacgtgggaggaggcgttaactagattaatttttgtgggaagtgattcaaaaggacgtagacaatacttttacggaaaaatgcatgtacagaatcgcaacgctaaaagagatcgtatttttgttagagtatataacgttatgaaacgaattaattgttttataaacaaaaatataaagaaatcgtccacagattccaattatcagttggcggtttttatgttaatggaaactatgttttttattagatttggtaaaatgaaatatcttaaggagaatgaaacagtagggttattaacactaaaaaataaacacatagaaataagtcccgatgaaatagttatcaagtttgtaggaaaggacaaagtttcacatgaatttgttgttcataagtctaatagactatataaaccgctattgaaactgacggatgattctagtcccgaagaatttctgttcaacaaactaagtgaacgaaaggtatacgaatgtatcaaacagtttggtattagaatcaaggatctccgaacgtatggagtcaattatacgtttttatataatttttggacaaatgtaaagtccatatctcctcttccgtcaccaaaaaagttaatagcattaactatcaaacaaactgctgaagtggtaggtcatactccatcaatttcaaaaagagcttatatggcaacgactattttagaaatggtaaaggataaaaattttttagatgtagtatctaaaactacgttcgatgaattcctatctatagtcgtagatcacgttaaatcatctacggatggatgatatagatctttacacaaataattacaagaccgataaatggaaatggataagcgtatgaaatctctcgcaatgacagctttcttcggagagctaagcacattagatattatggcattgataatgtctatatttaaacgccatccaaacaataccattttttcagtggataaggatggtcagtttatgattgatttcgaatacgataattataaggcttctcaatatttggatctgaccctcactccgatatctggagatgaatgcaagactcacgcatcgagtatagccgaacaattggcgtgtgcggatattattaaagaggatattagcgaatatatcaaaactactccccgtcttaaacgatttataaaaaaataccgcaatagatcagatactcgtatcagtcgagatacagaaaagcttaaaatagctctagctaaaggcatagattacgaatatataaaagacgcttgttaataagtaaatgaaaaaaaactagtcgtttataataaaacacgatatggatgccaacgtagtatcattttctactattgcgacgtatatagacgctttagcgaagaatgcttcggaattagaacagaggtctaccgcatacgaaataaataatgaattggaactagtatttattaagccgccattgattactttgacaaatgtagtgaatatctctacgattcaggaatcgtttattcgatttaccgttactaataaggaaggtgttaaaattagaactaagattccattatctaaggtacatggtctagatgtaaaaaatgtacagttagtagatgctatagataacatagtttgggaaaagaaatcattagtgacggaaaatcgtcttcacaaagaatgcttgttgagactatcgacagaggaacgtcatatatttttggattacaagaaatatggatcctctatccgactagaattagtcaatcttattcaagcaaaaacaaaaaactttacgatagactttaagctaaaatattttctaggatccggtgcccagtctaaaagttctttgttgcacgctattaatcatccaaagtcaaggcctaatacatctctggaaatagaattcacacctagagacaatgaaacagttccatatgatgaactaataaaggaattgacgactctctcgcgtcatatatttatggcttctccagagaatgtaattctttctccgcctattaacgcgcctataaaaacctttatgttgcctaaacaagatatagtaggtttggatctggaaaatctatatgccgtaactaagactgacggcattcctataactatcagagttacatcaaacgggttgtattgttattttacacatcttggttatattattagatatcctgttaagagaataatagattccgaagtagtagtctttggtgaggcagttaaggataagaactggaccgtatatctcattaagctaatagagcctgtgaatgcaatcaatgatagactagaagaaagtaagtatgttgaatctaaactagtggatatttgtgatcggatagtattcaagtcaaagaaatacgaaggtccgtttactacaactagtgaagtcgtcgatatgttatctacatatttaccaaagcaaccagaaggtgttattctgttctattcaaagggacctaaatctaacattgattttaaaattaaaaaggaaaatactatagaccaaactgcaaatgtagtatttaggtacatgtccagtgaaccaattatctttggagaatcgtctatctttgtagagtataagaaatttagcaacgataaaggctttcctaaagaatatggttctggtaagattgtgttatataacggcgttaattatctaaataatatctattgtttggaatatattaatacacataatgaagtgggtattaagtccgtggttgtacctattaagtttatagcagaattcttagttaatggagaaatacttaaacctagaattgataaaaccatgaaatatattaactcagaagattattatggaaatcaacataatatcatagtcgaacatttaagagatcaaagcatcaaaataggagatatctttaacgaggataaactatcggatgtgggacatcaatacgccaataatgataaatttagattaaatccagaagttagttattttacgaataaacgaactagaggaccgttgggaattttatcaaactacgtcaagactcttcttatttctatgtattgttccaaaacatttttagacgattccaacaaacgaaaggtattggcgattgattttggaaacggtgctgacctggaaaaatacttttatggagagattgcgttattggtagcgacggatccggatgctgatgctatagctagaggaaatgaaagatacaacaaattaaactctggaattaaaaccaagtactacaaatttgactacattcaggaaactattcgatccgatacatttgtctctagtgtcagagaagtattctattttggaaagtttaatatcatcgactggcagtttgctatccattattcttttcatccgagacattatgctaccgtcatgaataacttatccgaactaactgcttctggaggcaaggtattaatcactaccatggacggagacaaattatcaaaattaacagataaaaagacttttataattcataagaatttacctagtagcgaaaactatatgtctgtagaaaaaatagctgatgatagaatagtggtatataatccatcaacaatgtctactccaatgactgaatacattatcaaaaagaacgatatagtcagagtgtttaacgaatacggatttgttcttgtagataacgttgatttcgctacaattatagaacgaagtaaaaagtttattaatggcgcatctacaatggaagatagaccgtctacaaaaaactttttcgaactaaatagaggagccattaaatgtgaaggtttagatgtcgaagacttacttagttactatgttgtttatgtcttttctaagcggtaaataataatatggtatgggttctgatctcccagttctaaatgcattaaataattccaatagagcgatttttgttcctataggaccttccaactgtggatactctgtattgttaatagatatattaatacttttgtcgggtaacagaggttctacgtcttctaaaaataaaagttttataacatctggcctgttcataaataaaaacttggcgattctatatatactcttattatcaaatctagccattgtcttatagatgtgagctactgtaggtgtaccatttgattttctttctaatactatatatttctctcgaagaagttcttgcacatcatctgggaataaaatactactgttgagtaaatcagttattttttttatatcgatattgatggacatttttatagttaaggataataagtatcccaaagtcgataacgacgataacgaagtatttatacttttaggaaatcacaatgactttatcagattaaaattaacaaaattaaaggagcatgtatttttttctgaatatattgtgactccagatacatatggatctttatgcgtcgaattaaatgggtctagttttcagcacggcggtagatatatagaggtggaggaatttatagatgctggaagacaagttagatggtgttctacatccaatcatatatctaaagatatacccgaagatatgcacactgataaatttgtcatttatgatatttatacgtttgattcgttcaagaataaacgattggtattcgtacaggtacctccgtcgttaggagatgatagtcatttgactaatccgttattgtcaccgtattatcgtaattcagtagccagacaaatggtcaatgatatgatttttaatcaagattcatttttaaaatatttattagaacatctgattagaagccactatagagtttctaaacatataacaatagttagatacaaggataccgaagaattaaatctaacgagaatatgttataatagagataagtttaaggcgtttgtattcgcttggtttaacggcgtttcggaaaatgaaaaggtactagatacgtataaaaaggtatctaatttgatataatgaattcagtgactgtatcacacgcgccatatactattacttatcacgatgattgggaaccagtaatgagtcaattggtagagttttataacgaagtagccagttggctgctacgagacgagacgtcgcctattcctgataagttctttatacagttgaaacaaccgcttagaaataaacgagtatgtgtgtgtggtatagatccgtatccgaaagatggaactggtgtaccgttcgaatcaccaaattttacaaaaaaatcaattaaggagatagcttcatctatatctagattaaccggagtaattgattataaaggttataaccttaatataatagacggggttataccctggaattattacttaagttgtaaattaggagaaacaaaaagtcacgcgatttactgggataagatttccaagttactgctgcagcatataactaaacacgttagtgttctttattgtttgggtaaaacagatttctcgaatatacgggccaagttagaatccccggtaactaccatagtcggatatcatccagcggctagagaccgccaattcgagaaagatagatcatttgaaattatcaacgttttactggaattagacaacaaggcacctataaattgggctcaagggtttatttattaatgctttagtgaaattttaacttgtgttctaaatggatgcggctattagaggtaatgatgttatctttgttcttaagactataggtgtcccgtcagcgtgcagacaaaatgaagatccaagatttgtagaagcatttaaatgcgacgagttagaaagatatattgagaataatccagaatgtacactattcgaaagtcttagggatgaggaagcatactctatagtcagaattttcatggatgtagatttagacgcgtgtctagacgaaatagattatttaacggccattcaagattttattatcgaggtgtcaaactgtgtagctagattcgcgtttacagaatgcggcgccattcatgaaaatgtaataaaatccatgagatctaatttttcattgactaagtctacaaatagagataaaacaagttttcatattatctttttagatacgtataccactatggatacattgatagctatgaaacgaacactattagaattaagtagatcatctgaaaatccactaaccagatcgatagacactgccgtatataggagaaaaacaactcttcgggttgtaggtactaggaaaaatccaaattgcgacactattcatgtaatgcaaccaccgcatgataatatagaagattacctattcacttacgtggatatgaacaacaatagttattacttttctctacaacaacgattggaggatttagttcctgataagttatgggaaccagggtttatttcattcgaagacgctataaaaagagtttcaaaaatattcattaattctataataaactttaatgatctcgatgaaaataattttacaacggtaccactggtcatagattacgtaacaccttgtgcattatgtaaaaaacgatcgcataaacatccgcatcaactatcgttggaaaatggtgctattagaatttacaaaactggtaatccacatagttgtaaagttaaaattgttccgttggatggtaataaactgtttaatattgcacaaagaattttagacactaactctgttttattaaccgaacgaggagaccatatagtttggattaataattcatggaaatttaacagcgaagaacccttgataacaaaactaattttgtcaataagacatcaactacctaaggaatattcaagcgaattactctgtccaagaaaacgaaagactgtagaagctaacatacgagacatgttagtagattcagtggagaccgatacctatccggataaacttccgtttaaaaatggtgtattggacctggtagacggaatgttttactctggagatgatgctaaaaaatatacgtgtactgtatcaaccggatttaaatttgacgatacaaagttcgtcgaagacagtccagaaatggaagagttaatgaatatcattaacgatatccaaccattaacggatgaaaataagaaaaatagagagctatatgaaaaaacattatctagttgtttatgcggtgctaccaaaggatgtttaacattcttttttggagaaactgcaactggaaagtcgacaaccaaacgtttgttaaagtctgctatcggtgacctgtttgttgagacgggtcaaacaattttaacagatgtattggataaaggacctaatccatttatcgctaacatgcatttgaaaagatctgtattctgtagcgaactacctgattttgcctgtagtggatcaaagaaaattagatctgacaatattaaaaagttgacagaaccttgtgtcattggaagaccgtgtttctccaataaaattaataatagaaaccatgcgacaatcattatcgatactaattacaaacctgtttttgataggatagataacgcattaatgagaagaattgccgtcgtgcgattcagaacacacttttctcaaccttctggtagagaggctgctgaaaataatgacgcgtacgataaagtcaaactattagacgaggggttagatggtaaaatacaaaataatatatatagatttgcatttctatacttgttggtgaaatggtacaaaaaatatcatgttcctattatgaaactatatcctacacccgaagagattcctgactttgcattctatctcaaaataggtactctgttggtatctagctctgtaaagcatattccattaatgacggacctctccaaaaagggatatatattgtacgataatgtggtcactcttccgttgactactttccaacagaaaatatccaagtattttaattctagactatttggacacgatatagagagcttcatcaatagacataagaaatttgccaatgttagtgatgaatatctgcaatatatattcatagaggatatttcatctccgtaaatatatgctcatatatttatagaagatatcacatatctaaatgaataccggaatcatagatttatttgataatcatgttgatagtataccaactatattacctcatcagttagctactctagattatctagttagaactatcatagatgagaacagaagcgtgttattgttccatattatgggatcaggtaaaacaataatcgctttgttgttcgccttggtagcttccagatttaaaaaggtttacattctagtgccgaacatcaacatcttaaaaattttcaattataatatgggtgtagctatgaacttgtttaatgacgaattcatagctgagaatatctttattcattccacaacaagtttttattctcttaattataacgataacgtcattaattataacggattatctcgctacaataactctatttttatcgttgatgaggcacataatatctttgggaataatactggagaacttatgaccgtgataaaaaataaaaacaagattccttttttactattgtctggatctcccattactaacacacctaatactctgggtcatattatagatttaatgtccgaagagacgatagattttggtgaaattattagtcgtggtaagaaagtaattcagacacttcttaacgaacgcggtgtgaatgtacttaaggatttgcttaaaggaagaatatcatattacgaaatgcctgataaagatctaccaacgataagatatcacggacgtaagtttctagatactagagtagtatattgtcacatgtctaaacttcaagagagagattatatgattactagacgacagctatgttatcatgaaatgtttgataaaaatatgtataacgtgtcaatggcagtattgggacaacttaatctgatgaataatttagatactttatttcaggaacaggataaggaattgtacccaaatctgaaaataaataatggcgtgttatacggagaagaattggtaacgttaaacattagttccaaatttaaatactttattaatcggatacagacactcaacggaaaacattttatatacttttctaattctacatatggcggattggtaattaaatatatcatgctcagtaatggatattctgaatataatggttctcagggaactaatccacatatgataaacggcaaaccaaaaacatttgctatcgttactagtaaaatgaaatcgtctttagaggatctattagatgtgtataattctcctgaaaacgatgatggtagtcaattgatgtttttgttttcatcaaacattatgtccgaatcctatactctaaaagaggtaaggcatatttggtttatgactatcccagatactttttctcaatacaaccaaattcttggacgatctattagaaaattctcttacgccgatatttctgaaccagttaatgtatatcttttagccgccgtatattccgatttcaatgacgaagtgacgtcattaaacgattacacacaggatgaattaattaatgttttaccatttgacatcaaaaagctgttgtatctaaaatttaagacgaaagaaacgaatagaatatactctattcttcaagagatgtctgaaacgtattctcttccaccacatccatcaattgtaaaagttttattgggagaattggtcagacaatttttttataataattctcgtattaagtataacgataccaagttacttaaaatggttacatcagttataaaaaataaagaagacgctaggaattacatagatgatattgtaaacggtcacttctttgtatcgaataaagtatttgataaatctcttttatacaaatacgaaaacgatattattacagtaccgtttagactttcctacgaaccatttgtttggggagttaactttcgtaaagaatataacgtggtatcttctccataaaactgatgagatatataaagaaataaatgtcgagctttgttaccaatggatacctttccgttacattggaaccacacgagctgacgttagacataaaaactaatattaggaatgccgtatataagacgtatctccatagagaaattagtggtaaaatggccaagaaaatagaaattcgtgaagacgtggaattacctctcggcgaaatagttaataattctgtagttataaacgttccgtgtgtaataacctacgcgtattatcacgttggggatatagtcagaggaacattaaacatcgaagatgaatcaaatgtaactattcaatgtggagatttaatctgtaaactaagtagagattcgggtactgtatcatttagcgattcaaagtactgcttttttcgaaatggtaatgcgtatgacaatggcagcgaagtcactgccgttctaatggaggctcaacaaggtatcgaatctagttttgtttttctcgcgaatatcgtcgactcataaaaaagagaatagcggtaagtataaacacgaatactatggcaataattgcgaatgttttattctcttcgatatatttttgataatatgaaaaacatgtctctctcaaatcggacaaccatctcataaaatagttctcgcgcgctggagaggtagttgccgctcgtataatctctccagaataatatacttgcgtgtcgtcgttcaatttatacggatttctatagttctctgttatataatgcggtttgccctcatgattagacgacgacaatagtgttctaaatttagatagttgatcagaatgaatgtttattggcgttggaaaaattatccatacagcgtctgcagagtggttgatagttgttcctagatatgtaaaataatccaacttactaggcagcaaattgtctagataaaatactgaatcaaacggtgcagacgtattggcggatctaatggaatccaattgattaactatcttttgaaaatatacatttttatgatccaatacttgtaagaatatagaaataatgataagtccatcatcgtgtttttttgcctcttcataagaactatattttttcttattccaatgaacaagattaatctctccagagtatttgtacacatctatcaagtgattggatccataatcgtcttcctttccccaatatatatgtagtgatgataacacatattcattggggagaaaccctccacttatatatcctcctttaaaattaatccttactagttttccagtgttctggatagtggttggtttcgactcattataatgtatgtctaacggcttcaatcgcgcgttagaaattgcttttttagtttctatattaataggagatagttgttgcggcatagtaaaaatgaaatgataactgtttaaaaatagctcttagtatgggaattacaatggatgaggaagtgatatttgaaactcctagagaattaatatctattaaacgaataaaagatattccaagatcaaaagacacgcatgtgtttgctgcgtgtataacaagtgacggatatccgttaataggagctagaagaacttcattcgcgttccaggcgatattatctcaacaaaattcagattctatctttagagtatccactaaactattacggtttatgtactacaatgaactaagagaaatctttagacggttgagaaaaggttctatcaacaatatcgatcctcactttgaagagttaatattattgggtggtaaactagataaaaaggaatctattaaagattgtttaagaagagaattaaaagaggaaagtgatgaacgtataacagtaaaagaatttggaaatgtaattctaaaacttacaacacgggataaattatttaataaagtatatataagttattgcatggcgtgttttattaatcaatcgttggaggatttatcgcatactagtatttacaatgtagaaattagaaagattaaatcattaaatgattgtattaacgacgataaatacgaatatctgtcttatatttataatatgctagttaatagtaaatgaacttttacagatctagtataattagtcagattattaagtataatagacgactagctaagtctattatttgcgaggatgactctcaaattattacactcacggcattcgttaaccaatgcctatggtgtcataaacgagtatccgtgtccgctattttattaactactgataacaaaatattagtatgtaacagacgagatagttttctctattctgaaataattagaactagaaacatgtttagaaagaaacgattatttctgaattattccaattatttgaacaaacaggaaagaagtatactatcgtcatttttttctctagatccagctactactgataatgatagaatagacgctatttatccgggtggcatacccaaaaggggtgagaatgttccagagtgtttatccagggaaattaaagaagaagttaatatagacaattcttttgtattcatagacactcggttttttattcatggcatcatagaagataccattattaataaattttttgaggtaatcttctttgtcggaagaatatctctaacgagtgatcaaatcattgatacatttaaaagtaatcatgaaatcaaggatctaatatttttagatccgaattcaggtaatggactccaatacgaaattgcaaaatatgctctagatactgcaaaacttaaatgttacggccatagaggatgttattatgaatcattaaaaaaattaactgaggatgattgattaaaaaatataaattaatttaccatcgtgtatttttataacgggattgtccggcatatcatgtagatagttaccgtctacatcgtatactcgaccatctacgcctttaaatcctctatttattgacattaatctattagaattggaataccaaatattagtaccctcaattagtttattggtaatattttttttagacgatagatcgatggctcttgaaaccaaggttttccaaccggactcattgtcgatcggtgagaagtctttttcattagcatgaatccattctaatgatgtatgtttaaacactctaaacaattggacaaattcttttgatttgctttgaatgatttcaaataggtcttcgtctacagtaggcataccattagataatctagccattataaagtgcacgtttacatatctacgttctggaggagtaagaacgtgactattgagacgaatggctcttcctactatctgacgaagagacgcctcgttccatgtcatatctaaaatgaagatatcattaattgagaaaaaactaataccctcgcctccactagaagagaatacgcatgttttaatgcattctccgttagtgtttgattcttggttaaactcagccaccgccttgattctagtatcttttgttctagatgagaactctatattagagataccaaagactttgaaatatagtaataagatttctattcctgactgattaacaaatggttcaaagactagacatttaccatgggatgctaatattcccaaacatacatctataaatttgacgcttttctcttttaattcagtaaatagagagatatcagccgcactagcatcccctttcaatagttctccctttttaaaggtatctaatgcggatttagaaaactctctatctcttaatgaatttttaaaatcattatatagtgttgctatctcttgcgcgtattcgcccggatcacgattttgtctttcaggaaagctatcgaacgtaaacgtagtagccatacgtctcagaattctaaatgatgatatacctgtttttatttcagcgagtttagccttttgataaatttcttcttgctttttcgacatattaacgtatcgcattaatactgttttcttagcgaatgatgcagacccttctacgtcatcaaaaatagaaaactcgttattaactatatacgaacatagtcctcctagtttggagactaattctttttcatcgactagacgtttattctcaaatagcgattggtgttgtaaggatcctggtcgtagtaagttaaccaacatggtgaattcttgcacactattgacgataggtgtagccgataaacaaatcatcttatggttttttaacgcaatggtcttagataaaaaattatatactgaacgagtaggacggatcttaccatcttctttgattaatgatttagaaatgaagttatgacattcatcaataatgacgcatattctactcttggaattaatagttttgatattagtaaaaaatttatttctaaaattttgatcatcgtaattaataaaaatacaatccttcgttatctctggagcgtatctgagtatagtgttcatccaaggatcttctatcaaagcctttttcaccaataagataatagcccaattcgtataaatatccttaagatgtttgagaatatatacagtagtcattgttttaccgacacccgtttcatggaacaataaaagagaatgcatactgtctaatcctaagaaaactcttgctacaaaatgttgataatccttgaggcgtactacgtccgaccccatcatttcaacgggcatattagtagttctgcgtaaggcataatcgatataggccgcgtgtgatttactcatttatgagtgataagtaataactatgttttaaaaatcacagcagtagtttaactagtcttctctgatgtttgttttcgatactttttgaatcagaagtcatactagaataaagcaacgagtgaacgtaatagagagcttcgtatactctattcgaaaactctaagaacttattaatgaattccgtatccactggattgtttaaaatactaaattgaacactgttcacatccttccaagaagaagacttagtgacggacttaacatgagacataaataaatccaaattttttttacaaacatcactagccaccataatggcgctatctttcaaccagctatcgcttacgcattttagcagtctaacatttttaaagagactacaatatattctcatagtatcgattacacctctaccgaataaagttggaagtttaataatacaatatttttcgtttacaaaatcaaataatggtcgaaacacgtcgaaggttaacatcttataatcgctaatgtatagattgttttcagtgagatgattattagatttaatagcatctcgttcacgtttgaacagtttattgcgtgcgctgaggtcggcaactacggcgtccgctttagtactcctcccataatactttacgctattaatctttaaaatttcatagactttatctagatcgctttctggtaacatgatatcatgtgtaaaaagttttaacatgtcggtcggcattctatttagatcattaactctagaaatctgaagaaagtaattagctccgtattccagactaggtaatgggcttttacctagagacagattaagttctggcaatgtttcataaaatggaagaaggacatgcgttccctcccggatattttttacaatttcatccatttacaactctatagtttgttttcattattattagttattatctcccataatcttggtaatacttaccccttgatcgtaagataccttatacaggtcattacatacaactaccaattgtttttgtacataatagattggatggttgacatccatggtggaataaactactcgaacagatagtttatctttccccctagatacattagccgtaatagttgtcggcctaaagaatatctttggtgtaaagttaaaagttagggttcttgttccattattgctttttgtcagtagttcattataaattctcgagatgggtccgttctctgaatatagaacatcatttccaaatctaacttctagtctagaaataatatcggtcttattcttaaaatctattcccttgatgaagggatcgttaatgaacaaatccttggcctttgattcggctgatctattatctccgttatagacgttacgttgactagtccaaagacttacaggaatagatgtatcgatgatgttgatactatgtgatatgtgagcaaagattgttctcttagtggcatcactatatgttccagtaatggcggaaaactttttagaaatgttatatataaaagaattttttcgtgttccaaacattagcagattagtatgaagataaacactcatattatcaggaacattatcaatttttacatacacatcagcatcttgaatagaaacgataccatcttctggaacctctacgatctcggcagactccggataaccagtcggtgggccatcgctaacaataactagatcatccaacaatctactcacatatgcatctatataatctttttcatcttgtgagtaccctggatacgaaataaatttattatccgtatttccataataaggtttagtataaacagagagagatgttgccgcatgaacttcagttacagtcgccgttggttggtttatttgacctattactctcctaggtttctctataaacgatggtttaatttgtacattcttaaccatatatccaataaagctcaattcaggaacataaacaaattctttgttgaacgtttcaaagtcgaacgaagagtcacgaataacgatatcggatactggattgaaggttaccgttacggtaatttttgaatcggatagtttaagactgctgaatgtatcttccacatcaaacggagttttaatataaacgtatactgtagatggttctttaatagtgtcattaggagttaggccaatagaaatatcattaagttcactagaatatccagagtgtttcaaagcaattgtattattgatacaattattatataattcttcgccctcaatttcccaaataacaccgttacacgaagagatagatacgtgattaatacatttatatccaacatatggtacgtaactgaatcttcccatacctttaacttctggaagttccaaactcagaaccaaatgattaagcgcagtaatatactgatccctaatttcgaagctagcgatagcctgattgtctggaccatcgtttgtcataactccggatagagaaatatattgcggcatatacaaagttggaatttgactatcgactgcgaagacattagaccgtttaatagagtcatccccaccgatcaaagaattaatgatagtattattcattttctatttaaaatggaaaaagcttacaataaactccgtagagaaatatctataatttgtgagttttccttaaagtaacagcttccgtaaacgccgtctttatctcttagtaggtttattgtatttatgaccttttccttatcttcatagaatactaaaggcaacaaagaaatttttggttcttctctaagagctacgtgagacttaaccatagaagccaacgaatccctacatattttagaacagaaataccctacttcaccacccttgtatgtctcaatactaataggtctaaaaaccaaatcttgattacaaaaccaacacttatcaattacactatttgtcttaatagacacatctgccatagatttataatactttggtagtatacaagcgagtgcttcttctttagcgggcttaaagactgctttaggtgctgaaataaccacatctggaaggcttactcgcttagccatttaattacggaactatttttttatacttctaatgagcaagtagaaaacctctcatctacaaaaacgtactcgtgtccataatcctctaccatagttacacgttttttagatctcatatgtgctaaaaagttttcccatactaattggttactattatttttcgtataatttttaacagtttgaggttttagatttttagttacagaagtgatatcgaatattttatccaaaaagaatgaataattaattgtcttagaaggagtgttttcttggcaaaagaataccaagtgcttaaatatttctactacttcattaatcttttctgtactcagattcagtttctcatcttttacttgattgattatttcaaagactaacttataatcctttttatttattctctcgttagccttaagaaaactagatacaaaatttgcatctacatcatccgtggatatttgatttttttccatgatatccaagagttccgagataatttctccagaacattgatgagacaataatctccgcaatacatttctcaaatgaataagtttattagacacgtggaagtttgactttttttgtacctttgtacatttttgaaataccgactcgcaaaaaatacaatattcatatccttgttcagatactataccgttatgtctacaaccgctacataatcgtagattcatgttaacactctacgtatctcgtcgtccaatattttatataaaaacattttatttctagacgttgccagaaaatcctgtaatatttttagttttttgggctgtgaataaagtatcgccctaatattgttaccgtcttccgccaatatagtagttaaattatccgcacatgcagaagaacaccgcttaggcggattcagtacaatgttatatttttcgtaccaactcatttaaatatcataatctaaaatagttctgtaatatgtctagcgctaatatattgatcataatcctgtgcataaattaagatacaacaatgtctcgaaatcatcgacatggcttcttccatagttagaagatcgtcgtcaaagttagcaacgtgattcatcaacatttgctgttttgaggcagcaaatactgaaccgtcgccattcaaccattcataaaaaccatcgtctgaatccattgataatttcttgtactggtttttgagagctcgcatcaatctagcatttctagctcccggattgaaaacagaaagaggatcgtacatccagggtccattttctgtaaatagaatcgtataatgtcccttcaagaagatatcagacgatccacaatcaaagaattggtctccgagtttgtaacaaactgcggactttaacctatacatgataccgtttagcataatttctggtgatacgtcaatcggagtatcatctattagagatctaaagccggtgtaacattctccaccaaacatattcttattctgacgtcgttctacataaaacatcattgctccattaacgataacaggggaatgaacagcactacccatcacattagttcccaatggatcaatgtgtgtaactccagaacatcttccatagcctatgttaggaggagcgaacaccactcttccactattgccatcgaatgccatagaataaatatccttggaattgatagaaatcggactgtcggatgttgtgatcatcttcataggattaacaactatgtatggtgccgcctgaagtttcatatcgtaactgatgccgtttataggtctagccacagaaaccaacgtaggtctaaatccaactatagacaaaatagaagccaatatctgttcctcatctgtcataacttgagagcatccagtatgaataatcttcattagatggggatctaccgcatcatcatcgttacaataaaaaattcccattctaatgttcataattgcttttctaatcatggtatgcatgtttgctctctgaatctctgtggaaattagatctgatacacctgtaatcactatcggattatcctccgtaagacgattaaccaacaacatataattataagactttacttttctaaattcataaagttgctggattaggctataggtgtctccatgtacatacgcgttctcgagcgcaggaagtttaataccgaatagtgccatcagaataggatgaatatagtaattagtttctggttttctataaataaaagacaaatcttgtgaactagacatatcggtaaaatgcatggattggaatcgtgtagtcgacagaagaatatgatgattagatggagagtatattttatctaactctttgagttggtcaccgattctaggactagctcgagaatgaataagtactaaaggatgagtacatttcacagaaacactagcattgttcaatgtgctctttacatgggtaaggagttgaaatagctcgtttctatttgttctgacaatatttagtttattcataatgttaagcatatcctgaatagtaaagttagatgtgtcatacttgttagtagttagatatttagcaattgcattcccatcatttctcaatctcgtactccaatcatgcgtggatgctacttcgtcgatggaaaccatacaatcctttttgataggctgttgagattgatcatttcctgcacgtttaggtttggtacgttgatttctagcccctgcggatataaagtcatcgtctacaatttgggacaatgaattgcatacactacaagacaaagatttatcagaagtgtgaatatgatcttcatctaccaaagaaagagtttgattagtataactagattttagtcctgcgttagatgttaaaaaaacatcgctattgaccacggcttccattatttatattcgtagtttttactcgaaagcgtgattttaatatccaatcttattacttttggaatcgttcaaaacctttgactagttgtagaatttgatctattgccctacgcgtatactcccttgcatcatatacgttcgtcaccagatcgtttgtttcggcctgaagttggtgcatatctctttcaacattcgacatgagatccttaagggccatatcgtctagattttgttgagatgctgctcctggatttggattttgttgtgctgttgtacatactgtaccaccagtaggtgtaggagtacatacagtggccacaataggaggttgagaaagtgtaaccgttggagtagtacaagaaatacttccatccgattgttgtgtacatgtagttgttggtaacgtctgagaaggttgggtagatggcggcgtcgtcgttttttgatctttattaaatttagagataatatcctgaacagcattgctcggcgtcaacgctggaaggagtgaactcgccggcgcatcagtatcttcagacagccaatcaaaaagattagacatatcagatgatgtattagtttgttgtcgtggttttggtgtaggagcagtactactaggtagaagaataggagccgatgtagctgttggaaccggctgtggagttatatgaatagttggttgtagcggttggataggctgtctgctggcggccatcatattatctctagctagttgttctcgcaactgtctttgataatacgactcttgagactttagtcctatttcaatcgcttcatcctttttcgtatccggatccttttcttcagaataatagattgacgactttggtgtagaggattctgccagcctctgtgagaacttgttaaagaagtccatttaaggctttaaaattgaattgcgattataagattaaatggcagacacagacgatattatcgactatgaatccgatgatctcaccgaatacgaggatgatgaagaagaggaagaagatggagagtcactagaaactagtgatatagatcccaaatcttcttataagattgtagaatcagcatccactcatatagaagatgcgcattccaatcttaaacatatagggaatcatatatctgctcttaaacgacgctatactagacgtataagtctatttgaaatagcgggtataatagcagaaagctataacttgcttcaacgaggaagattacctctagtttcagaattttctgacgaaacgatgaagcaaaatatgctacatgtaattatacaagagatagaggagggttcttgtcctatagtcatcgaaaagaacggagaattgttgtcggtaaacgattttgacaaagatggtctaaaattccatctagactatattatcaaaatttggaaacttcaaaaacgatattagaatttatacgaatatcgttctctaaatgtcacaatcaagtctcgcatgttcagcaatttattgtcgtactttatatcgtgttcattaacgatatcttgcaaaatagtaatgattctatcttccttcgatagatattcttcagagattattgtcttatattctttcttgttatcagatatgaatttgataagactttgaacattattgatacccgtctgtttaattttttctacagatattttagttttggcagattctatcgtatctgtcaatagacatccaacatcgacattcgacgtcaattgtctataaatcaacgtataaattttagaaataacattagcgaattgttgtgcgttgatgtcgttattctgaaacagtatgattttaggtagcattttcttaacaaagagaacgtatttattgttactcagttgaacagatgatatatccagattactaacgcatctgattccgtataccaaactttcagaagaaatggtatacaattgtttgtattcattcaatgtctctttttcagaaattagtttagagtcgaatactgcaataattttcaagagatagttttcatcagataagattttatttagtgtagatatgataaaactattgttttgttggagaacttgatacgccgcgttctctgtagtcgacgctctcaaatgggaaacaatctccattatttttttggaatcggatactatatcttcggtatcttgacgcagtctagtatacatagagttaagagagattagagtttgtacattaagcaacatgtctctaaatgtggctacaaacttttcctttttcacatcatctagtttattatataccgatttcacaacggcaccagatttaaggaaccagaatgaaaaactctgataactacaatatttcatcatagttacgattttatcatcttctatagttggtgtaatagcgcatacctttttctccaagactggaaccaacgtcataaaaatgtttaaatcaaaatccatatcaacatctgatgcgctaagaccagtctcgcgttcaagattatctttactaatggtgacgaactcatcgtataaaactctaagtttgtccattatttatttacagatttagttgtttaatttatttgtgctcttccagagttgggatagtatttttctaacgtcggtattatattattaggatctacgttcatatgtatcataatattaatcatccacgttttgataaatctatctttagcttctgaaataacgtatttaaacaaaggagaaaaatatttagctacggcatcagacgcaataacattttttgtaaatgtaacgtatttagacgacagatcttcgttaaaaagttttccatctatgtagaatccatcggttgttaacaccattcccgcgtcagattgaataggagtttgaatagtttgttttggaaatagatccttcaataacttatagttgggtgggaaaaaatcgattttatcactagactctttcttttttactatcattacctcatgaactatttcttgaatgagtatatgtattttctttcctatatcggacgcgttcattggaaaatataccatgtcgttaactataagaatatttttatcctcgtttacaaactgaataatatcagatgtagttcgtaaacgaactatatcatcaccagcacaacatctaactatatgatatccactagtttcctttagccgtttattatcttgttccatattagcagtcattccatcatttaagaaggcgtcaaaaataatagggagaaatgacattttggattctgttacaactttaccaaaattaaggatatacggacttactatctttttctcaacgtcaatttgatgaacacacgatgaaaatgtgcttctatgagattgatcatgtagaaaacaacaagggatacaatatttccgcatatcatgaaatatattaagaaatcccaccttattatatttccccaaaggatccatgcacgtaaacattatgccgttatcattaataaagacttctttctcatcggatctgtaaaagttgttactgatttttttcattccaggatctagataattaataatgatgggttttctattcttattctttgtattttggcatatcctagaccagtaaacagtttccactttggtaaaatcagcagacttttgaacgctattaaacatggcattaatggcaataactaaaaatgtaaaatatttttctatgttaggaatatggtttttcactttaatagatatatggtttttggccaaaatgatagatatttttttatccgaggatagtaaaatattattagtcgccgtctctataaaaatgaagctagtctcgatatccaattttattctagaattgataggagtcgccaaatgtaccttatacgttatatctcccttgatgcgttccatttgtgtatctatatcggacacaagatctgtaaatagttttacgttattaatcatcacggtatcgccgtcgctagataacgctaatgtaccatccaagtcccaaatggagagatttaactgttcatcgtttagaataaaatgattaccggtcatattaataaagtgttcatcgtatctagataacaacgacttataattaatgtccaagtcttgaactcgctgaatgatcttttttaacccagttagttttagattggtacgaaatatattgttaaactttgattctacagtaatgtccaaatctagttgtggaaatacttccatcaacattgtttcaaacttgataatattattatctacatcttcgtacgatccaaattccggaatagatgtatcgcacgctctggccacccagataaccaaaaagtcacacgctccaggatatacattgtataaaaagctatcgttttttagtagggtttttttctgcgtgtatacgaagggattaaaaatagtattatcaacgtaactatattccaaattattcttatgagaatagataataatatcgtccttaatatctaacaaatttcctaaatatccctttaattgagtcattcgaagcgtcaatagaatatgtctcttaactatttccggctgttgtatatttaaatgacttcgtaaaaaataatatatgggcgacttctcatctatgtaatcatatggagtgagatatagggctcgttctacctcctgccccttacccacctgtaataccaattgcggacttactatatatcgcatatttatatcgtggggtaaagtgaaaatctactaccgatgatgtaagtcttacaatgttcgaaccagtaccagatcttaatttggaggcctccgtagaactaggggaggtaaatatagatcaaacaacacctatgataaaggagaatagcggttttatatcccgcagtagacgtctattcgcccatagatctaaggatgatgagagaaaactagcactacgattctttttacaaagactttattttttagatcatagagagattcattatttgttcagatgcgttgacgctgtaaaagacgtcactattaccaaaaaaaataacattatcgtggcgccttatatagcacttttaactatcgcatcaaaaggatgcaaacttacagaaacaatgattgaagcattctttccagaactatataatgaacatagtaagaaatttaaattcaactctcaagtatccatcatccaagaaaaactcggataccagtttggaaactatcacgtttatgattttgaaccgtattactctacagtagctctggctattcgagatgaacattcatctggcatttttaatatccgtcaagagagttatctggtaagttcattatctgaaataacatatagattttatctaattaatctaaaatctgatcttgttcaatggagtgctagtacgggcgctgtaattaatcaaatggtaaatactgtattgattacagtgtatgaaaagttacaactggtcatagaaaatgattcacaatttacatgttcattggctgtggaatcaaaacttccaataaaattacttaaagatagaaatgaattatttacaaaattcattaacgagttaaaaaagaccagttcattcaagataagcaaacgcgataaggatacgctactaaaatattttacttaggactggagttagaatttatagacgactcatttcgtttatcattgttactattattactattactatcattattagtgttggcattattagtattcttcttgtcatcttgttcagaaatatacagcaatgctatacctaatactaaatacattatcatgctcgcaatggctctaacaacaacgaaccaaaatgaatttggtcgtagcttttgttcacaaaaatacataaagaaatgtctacataaatctatggcgccattggctacttgaaatagcgccagtcctcctacagattttaatatagctgtataacatgacatttattcatcatcaaaagagacagagtcaccatctgtcatatttagattttttttcatgtgttcaaagtatcctctactcatttcattataatagtttatcatacttagaattttaggacggatcaatgagtaagacttgactagatcgtcagtagtaatttgtgcatcgtctattctgcatccgcttcgtcgaataatgtatagcatcgctttgagattctccatagctatcaagtctttatacaatgacatggaaatatctgtgaatactttatacttctccaacatcgatgccttaacatcatcgcctactttagcattgaaaatacgttctattgtgtagatggatgtagcaagatttttaaacaacaatgccatcttacacgatgattgcctcaagtctccaatcgtttgtttagaacgattagctacagagtccaatgcttggctgactagcatattattatctttagaaattgtattcttcaatgaggcgtttatcatatctgtgatttcgttagtcatattacagtctgactgggttgtaatgttatccaacatatcacctatggatacggtacacgtaccagcatttgtaataatcctatctaagatgttgtatggcattgcgcagaaaatatcttctcctgtaatatctccactctcgataaatctactcagattattcttaaatgccttattctctggagaaaagatatcagtgtccatcatttcattaatagtatacgcagaaaagataccacgagtatcaattctatccaagatacttatcggttccgagtcacagataatggtttcctctccttcgggagatcctgcatagaaatatctaggacaatagtttctatactgtctgtaactctgataatctctaaagtcactaactgataccatgaaattgagaagatcaaacgctgaagtaattaatttttctgcctcgtttttactacaactagttttcatcaatgtagtgacgatgtattgtttagttacttttggtctaatactgatgatagagatattattgcttcccataatggatcttctagtagtcaccttaaagcccattgatgcgaatagcagatagataaagtcttggtatgactcctttctaatatagtacggactacctttgtcacccaactttatacccacataagccataacaacctctttaatagccgtttcatgaggtttatcagccatgagcctgagtagttggaagaatctcatgaatcccgtctcagaaagtcctatatgcatgatagatttatctttcctgggaaactctcgtatagtcatagatgaaatactctttaaagtttctgaaataagattagtaacagtcttacctccgactactctaggtaacaaacaaactctaataggtgttttctctgcggagataatatcagaaaggatagagcaataagtagtattattgtgattataaagaccgaatacataacaggtagaatttataaacatcatgtcctgaaggtttttagacttgtattcctcgtaatccataccgtcccaaaacatggatttggtaactttgatagccgtagatctttgttccttcgccaacaggttaaagaaattaataaagaatttgttgtttctatttatgtccacaaattgcacgtttggaagcgccacggttacattcactgcagcattttgaggatcgcgagtatgaagtacgatgttattgtttactggtatatctggaaagaaatctaccagtctaggaataagagattgatatcgcatagaaatagtaaagtttataatctcatcatcgaagagcattttgttaccattgtaataaatatccactctgtcatatgtataaatgaagtactgttcaaacatgatgagatgtttatatgttggcatagtagtgagatcgacgtttggtaatggcaatgtattaagattaactccataatgtctagcagcatctgcgatgttataagcgtcgtcaaagcggggtcgatcttgtattgttatatattgtctaacacctataagattatcaaaatcttgtctgcttaatacaccgttaacaatttttgccttgaattcttttattggtgcattaataacatccttatagaggatgttaaacaaataagtgttatcaaagttaagatctggatatttcttttctgctagaacatccattgagtcggagccatctggtttaatataaccaccgataaatctagctctgtattctgtatccgtcaatctaatattaagaaggtgttgagtgaaaggtggaagatcgtaaaagctgtgagtattaatgataggattagtttccgaactaatgttaattggggtattaataatatctatatttccagcgttaagtgtaacattaaacagttttaattcacgtgacgtggtatcaattaaataattaatgcccaatttggatatagcagcctgaagctcatcttgtttagttacggatcctaatgagttattaagcaatatatcgaacggatgaacgaaggttgttttaagttggtcacatactttgtaatctagacatagatgcggaagaacggtagaaactatacgaaataaatattcagagtcctctaattgatcaagagtaactattgacttaataggcatcatttatttagtattaaatgacgaccgtaccagtgacggatatacaaaacgatttaattacagagttttcagaagataattatccatctaacaaaaattatgaaataactcttcgtcaaatgtctattctaactcacgttaacaacgtggtagatagagaacataatgccgccgtagtgtcatctccagaggaaatatcctcacaacttaatgaagatctatttccagatgatgattcaccggccactattatcgaacgagtacaacctcatactactattattgacgatactccacctcctacgtttcgtagagagttattaatatcggaacaacgtcaacaacgagaaaaaagatttaatattacagtatcgaaaaatgctgaagcaataatggaatctagatctatgataacttctatgccaacacaaacaccatccttgggagtagtttatgataaagataaaagaattcagatgttagaggatgaagtggttaatcttagaaatcaacgatctaatacaaaatcatctgataatttagataattttaccaaaatactatttggtaagactccgtacaaatcaacagaagttaataagcgtatagccatcgttaattatgcaaatttgaacgggtcccccttatcagtcgaggacttggatgtttgttcggaggatgaaatagatagaatctataaaacgattaaacaatatcacgaaagtagaaaacgaaaaattatcgtcactaacgtgattattattgtcataaacattatcgagcaggcattgctaaaactcggatttgaagaaatcaaaggactgagtaccgatatcacttcagaaattatcgatgtggagatcggagatgactgcgatgctgtagcatctaaactaggaatcggtaacagtccggttcttaatattgtattgtttatactcaagatattcgttaaacgaattaaaattatttaatttaatacattcccatatccagacaacaatcgtctggattaatctgttcctgtcgtctcataccggacgacatattaatctttttattagtgggcatctttttagatggtttctttttcccagcattaactgagtcgatacctagaagatcgtgattgatctctccgaccattccacgaacttctaattggccgtctctgacggtaccataaactattttaccagcattagtaacagcttggacaatctgaccatccatcgcattgtacgatgtagtagtaactgttgttctacgtctaggagcaccagaagtatttttggagcccttggatgttgatgtagaagaagacgaggattttgattttggtttacatgtaatacattttgaactctttgattttgtatcacatgcgccggcagtcacatctgtttgagaattaagattattgttgcctcctttgacggctgcatctccaccgatttgcgctagtagatttttaagctgtggtgtaatcttattaactgtttcgatataatcatcgtaactgcttctaacggctaaattttttttatccgccatttagaagctaaaaatatttttatttatgcagaagatttaactagattatacaatgaactaatatgatccttttccagattatttacaaacttggtattttttggttctggaggaggcgaatttaaattcggacttggattcggattttgtaagttcttgatcttattatacatcgagtataggatggcgacagtaactgctacacaaataccgatcaaaagaagaataccaatcatttattgacaataacttcactattgatcaagtatgcaatatatcatcttttcactaaataagtagtaataatgattcaacaatgtcgagatatatggacgataataatttagttcatggaaatatcgctatgattggtgtgaatgactccgctaactctgtggggtgcgcagtgctttccccacatagaataaattagcattccgactgtgataataataccaagtataaacgccataatactcaatactttccatgtacgagtgggactggtagacttactaaagtcaataaaggcgaagatacacgaaagaatcaaaagaatgattccagcgattagcacgccggaaaaataatttccaatcataagcatcatgtccatttaactaataaaaattttaaatcgccgaatgaacaaagtggaatataaaccatataaaaacaatagtttgtactgcaaaaataatatctatttttgttttcgaagatatggtaaaattaaatagtagtacacagcatgttataactaacagcagcaacggctcgtaattacttatcatttactagacgaaaaggtggtgggatattttcttgctcaaataatacgaatatatcacccatccattttatgcgatgtttatatactctaatctttaatagatctatagacgacgggtttaccaacaatatagattttatcgattcatctaatttaaacccttccttaaacgtgaatgatctattatctggcataacgatgaccctacctgatgaatcggacaatgtactgggccatgtagaataaattatcaacgaattatcgtctacgaacatttatatcatttgttttaattttaggacgcgaataaatggatataaaatagaaaataacagatattacaaccagtgttatggccgcgcccaaccaggtaggcagttttattttatcttttactacaggttctcctggatgtacgtcaccaacggcggacgtagttctagtacaattagacgtaagttccgcttgggaattttttaacgctaaagagttaacgttaatcgtgcacccaacgtatttacatctagttcgttgaacatcttgattataatataaccattttctatctctagattcgtcagtgcactcatgtaaccaacataccctaggtcctaaatatttatctccggaattagattttggataattcgcgcaccaacaatttctatttcctttatgatcgttacaaaagacgtataatgccgtatccccaaaagtaaaataatcaggacgaataattctaataaactcagaacaatatctcgcatccatatgtttggagcaaatatcggaataagtagacatagccggtttccgttttgcacgtaaccattctaaacaattggggtttccaggatcgtttctacaaaatccagtcatgaaatcgtcacaatgttctgtcttgtaattattattaaatatttttggacagtgtttggtatttgtcttagaacaacattttgccacgctatcactatcgcccaggagataatccttttttataaaatgacatcgttgcccggatgctatataatcagtagcgtgttttaaatccttaatatattcaggagttacctcgttctgataatagattaatgatccaggacgaaatttgaaagaactacatggttctccatgaattaatacatattgtttagcaaattcaggaactataaaactactacaatgatctatcgacataccatctatcaaacaaaacttgggtttaatttctcccggagatgtttcataatagtacgtataactttcttctgcaaacttaacagctctattatattcaggataattaaaacctaattccatatatttgtctcgtatatctgctattcctggtgctattttgattctattaagagtaacagctgcccccattcttaataatcgtcagtatttaaactgttaaatgttggtatatcaacatctaccttatttcccgcagtataaggtttgttgcaggtatactgttcaggaatggttacatttatacttcttctatagtcctgtctttcgatgttcatcacatatgcaaagaacagaataaacaaaataatgtaagaaataatattaaatatctgtgaattcgtaaatacattgattgccataataattacagcagctacaatacacacaatagacattcccacagtgttgccattacctccacgatacatttgagttactaagcaataggtaataactaagctagtaagaggcaatagaaaagatgagataaatatcatcaatatagagattagaggagggctatatagagccaagacgaacaaaatcaaaccgagtaacgttctaacatcattatttttgaagattcccaaataatcattcattcctccataatcgttttgcatcatacctccatctttaggcataaacgattgctgctgttcctctgtaaataaatctttatcaagcactccagcacccgcagagaagtcgtcaagcatattgtaatatcttaaataactcatttatatattaaaaaatgtcactattaaagatggagtataatctttatgccgaactaaaaaaaatgacttgtggtcaacccctaagtctttttaacgaagacggggatttcgtagaagttgaaccgggatcatcctttaagtttctgatacctaagggattttacgcctctccttccgtaaagacgagtctagtattcgagacattaacaacgaccgataataaaatcactagtatcaatccaacaaatgcgccaaagttatatcctcttcaacgcaaagtcgtatctgaagtagtttctaatatgaggaaaatgatcgaatcaaaacgtcctctatacatcactcttcacttggcgtgtggatttggtaagactattaccacgtgttatcttatggctacacacggtagaaaaaccgtcatttgcgtacccaataaaatgttaatacatcaatggaagacacaggtagaggcagtcggattggaacataagatatccatagatggagtaagtagtctattaaaggaactaaagactcaaagtccggatgtattaatagtagtcagtagacatctgacaaacgatgccttttgtaaatatatcaataagcattatgatttgttcatcttggatgaatcacatacgtataatctgatgaacaatacagcagttacaagatttttagcgtattatcctccgatgatgtgttattttttaactgctacacctagaccatctaaccgaatttattgtaacagtattattaatattgccaagttatccaatctaaaaaaaactatctatgcagtagatagtttttttgagccatattccacagataatattagacatatggtaaaacgactagatggaccatctaataaatatcatatatataccgagaagttattatctgtagacgagcctagaaatcaacttattcttgataccctggtagaagaattcaagtcaggaactattaatcgcattttagttattactaaactacgtgaacatatggtattattctacaaacgattattagattttttcggaccagaggttgtatttataggagacgcccaaaatagacgtactccagatatggtcaaatcaatcaaggaactaaatagatttatattcgtatccaccttattttattccggtactggtttagatattcctagtttggattcgttgttcatttgctcggcagtaatcaacaatatgcaaatagagcaattactagggagggtatgtcgagaaacagaactattagataggacggtatatgtatttcctaacacatccatcaaagaaataaagtacatgataggaaatttcatgcaacgaattattagtctgtctgtagataaactaggatttaaacaaaaaagttatcggaaacatcaagaatccgatcccacttctgcatgtacaacatcatccagagaagaacgtgtattaaatagaatatttaactcgcaaaatcgttaagaagtttaagcgacgatccgcatgctgcgcaggccagtgtattacccctcatagtattaatataatccaatgatacttttgtgatgtcggaaatcttaaccaatttagactgacaggcagaacacgtcatgcaatcatcatcgtcatcgataactgtagtcttgggcttctttttgcgactcttcattccggaacgcacattggtgctatccatttaggtagtaaaaaataagtcagaatatgccctataacacgatcgtgcaaaacctggtatatcgtctctatctttatcacaatatagtgtatcgacatttttattattattgacctcgtttatcttggaacatggaatgggaacatttttgttatcaacggccatctttgccttaattccagatgttgtaaaattataactaaacagtctatcatcgacacaaatgaaattcttgtttagacgtttgtagtttacgtatgcggctcgttcgcgtctcattttttcagatattgcaggtactataatattaaaaataagaatgaaataacataggattaaaaataaagttatcatgacttctagcgctgatttaactaacttaaaagaattacttagtctgtacaaaagtttgagattttcagattctgcggctatagaaaagtataattctttggtagaatggggaacatctacttactggaaaataggcgtgcaaaaggtagctaatgtcgagacgtcaatatctgattattatgatgaggtaaaaaataaaccgtttaatattgatccgggctattacattttcttaccggtatattttgggagcgtctttatttattcgaagggtaaaaatatggtagaacttggatctggaaactcttttcaaataccagatgatatgcgaagtgcgtgtaacaaagtattagacagcgataacggaatagactttctgagatttgttttgttaaacaatagatggataatggaagatgctatatcaaaatatcagtctccagttaatatatttaaactagctagtgagtacggattaaacatacccaaatatttagaaattgaaatagaggaagacacattatttgacgacgagttatactctattatagaacgctctttcgatgataaatttccaaaaatatccatatcgtatattaagttgggagaacttagacggcaagttgtagactttttcaaattctcattcatgtatattgagtccatcaaggtagatcgtataggagataatatttttattcctagcgttataacaaaatcaggaaaaaagatattagtaaaagatgtagaccatttaatacgatccaaggttagagaacatacatttgtaaaagtaaaaaagaaaaacacattttccattttatacgactatgatggaaacggaacagaaactagaggagaagtaataaaacgaattatagacactataggacgagactattatgttaacggaaagtatttctctaaggttggtagtgcaggcttaaagcaattgactaataaattagatattaatgagtgcgcaactgtcgatgagttagttgatgagattaataaatccggaactgtaaaacgaaaaataaaaaaccaatcagcatttgatttaagcagagaatgtttgggatatccagaagcggattttataacgttagttaataacatgcggttcaaaatagaaaattgtaaggttgtaaatttcaatattgaaaatactaattgtttaaataacccgagtattgaaactatatatggaaactttaaccagttcgtctcaatctttaatgtcgtcaccgatgtcaaaaaaagattattcgagtgaaataatatgcgcctttgatataggtgcaaaaaatcctgccagaactgttttagaagtcaaggataactccgttagggtattggatatatcaaaattagactggagttctgattgggaaaggcgcatagctaaagatttgtcacaatatgaatacactacagttcttctagaacgtcagcctagaaggtcgccgtatgttaaatttatctattttattaaaggctttttatatcatacatcggctgccaaagttatttgcgtctcgcctgtcatgtctggtaattcatatagagatcgaaaaaagagatcggtcgaagcatttcttgattggatggacacattcggattgcgagactccgttccggatagacgcaaattagacgatgtagcggatagtttcaatttggctatgagatacgtattagataaatggaatactaattatacaccttataataggtgtaaatctagaaattacataaaaaaaatgtaataacgttagtaacgccattatggataatctatttacctttctacatgaaatagaagatagatatgccagaactatttttaactttcatctaataagttgcgatgaaataggagatatatatggtcttatgaaagaacgcatttcctcagaggatatgtttgataatatagtgtataataaagatatacatcctgccattaagaaactagtgtattgcgacatccaacttactaaacacattattaatcagaatacgtatccggtatttaacgattcttcacaagtgaaatgttgtcattatttcgacataaactcagataatagcaatattagctctcgtacagtagagatatttgagagggaaaagtcatctcttgtatcatatattaaaactaccaataagaagagaaaggtcaattacggcgaaataaagaaaactgttcatggaggcactaatgcaaattacttttccggtaaaaagtctgacgagtatctgagtactacagttagatccaacattaatcaaccttggatcaaaaccatctctaagaggatgagagttgatatcattaatcactctatagtaacgcgtggaaaaagctctatattacaaactatagaaattatttttactaatagaacatgtgtgaaaatattcaaggattctactatgcacattattctatccaaggacaaggatgaaaaggggtgtatacacatgattgacaaattattctatgtctattataatttatttctgttgttcgaagatatcatccaaaacgagtactttaaagaagtagctaatgttgtaaaccacgtactcacggctacggcattagatgagaaattattcctaattaagaaaatggctgaacacgatgtttatggagttagcaatttcaaaatagggatgtttaacctgacatttattaagtcgttggatcataccgttttcccctctctgttagatgaggatagcaaaataaagttttttaaggggaaaaagctcaatattgtagcattacgatctctggaggattgtataaattacgtgactaaatccgagaatatgatagaaatgatgaaggaaagatcgactattttaaatagcatagatatagaaacggaatcggtagatcgtctaaaagaattgcttctaaaatgaaaaaaaacactaattcagaaatggatcaacgactagggtataagtttttggtgcctgatcctaaagccggagttttttatagaccgttacatttccaatatgtatcgtattctaattttatattgcatcgattgcatgaaatcttgaccgtcaagcggccactcttatcgtttaagaataatacagaacgaattatgatagaaattagcaatgttaaagtgactcctccagattactcacctataatcgcgagtattaaaggtaagagttatgacgcattagccacgttcactgtaaatatctttaaagaggtaatgaccaaagagggtatatccatcactaaaataagtagttatgagggaaaagattctcatttgataaaaattccgctactaataggatacgggaataaaaatccacttgatacagccaagtatcttgttcctaatgtcataggtggagtctttatcaataaacaatctgtcgaaaaagtaggaattaatctagtagaaaagattacaacatggccaaaatttagggttgttaagccaaactcattcactttctcgttttcctccgtatcccctcctaatgtattaccgacaagatatcgccattacaagatatctctggatatatcacaattggaagcgttgaatatatcatcgacaaagacatttataacggtcaatattgttttgctgtctcaatatttatctagagtgagtctagaattcattagacgtagtttatcatacgatatgcctccagaagttgtctatctagtaaacgcgataatagatagtgctaaacgaattactgaatctattactgactttaatattgatacatacattaatgacctggtggaagctgaacacattaaacaaaaatctcagttaacgatcaacgagttcaaatatgaaatgctgcataactttttacctcatatgaactatacacccgatcaactaaagggattttatatgatatctttactaagaaagtttctctactgtatcttccacacttctagatatccagatagagattcgatggtttgtcatcgcatcctaacgtacggcaaatattttgagacgttggcacatgatgaattagagaattacataggcaacatccgaaacgatatcatgaacaatcacaagaacagaggcacttacgcggtaaacattcatgtactaacaactcccggacttaatcacgcgttttctagcttattgagtggaaagttcaaaaagtcagacggtagttatcgaacacatcctcactattcatggatgcagaatatttctattcctaggagtgttggattttatccggatcaagtaaagatttcaaagatgttttctgtcagaaaataccatccaagtcaatatctttacttttgttcatcagacgttccggaaagaggtcctcaggtaggtttagtatctcaattgtctgtcttgagttccattacaaatatactaacgtctgagtatttggatttggaaaagaaaatttgtgagtatatcagatcatattataaagatgatataagttactttgaaacaggatttccaatcactatagaaaatgctctagtcgcatctcttaatccaaatatgatatgtgattttgtaactgactttagacgtagaaaacggatgggattcttcggtaacttggaggtaggtattactttagttagggatcacatgaatgaaattcgcattaatattggagcgggaagattagtcagaccattcttggttgtggataacggagagctcatgatggatgtgtgtccggagttagaaagcagattagacgacatgacattctctgacattcagaaagagtttccgcatgtcatcgaaatggtagatatagaacaatttacttttagtaacgtatgtgaatcggttcaaaaatttagaatgatgtcaaaggatgaaagaaagcaatacgatttatgtgactttcctgccgaatttagagatggatatgtagcatcttcattagtgggaatcaatcacaattctggacccagagctattcttggatgtgctcaagctaaacaagctatctcttgtctgagctcggatatacgaaataaaatagacaatggaattcatttgatgtatccagagaggccaatcgtgattagtaaggctttagaaacttcaaagattgcggctaattgcttcggccaacatgttactatagcattaatgtcgtacaaaggtatcaatcaagaggatggaattatcatcaaaaaacaatttattcagagaggcggtctcgatattgttacagccaagaaacatcaagtagaaattccattggaaaactttaataacaaagaaagagataggtctaacgcctattcaaaattagaaagtaatggattagttagactgaatgctttcttggaatccggagacgctatggcacgaaatatctcatcaagaactcttgaagatgattttgctagagataatcagattagcttcgatgtttccgagaaatataccgatatgtacaaatctcgcgttgaacgagtacaagtagaacttactgacaaagttaaggtacgagtattaaccatgaaagaaagaagacccattctaggagacaaatttaccactagaacgagtcaaaagggaacagtcgcgtatgtcgcggatgaaacggaacttccatacgacgaaaatggtatcacaccagatgtcattattaattctacatccatcttctctagaaaaactatatctatgttgatagaagttattttaacagccgcatattctgctaagccgtacaacaataagggagaaaaccgacctgtctgttttcctagtagtaacgaaacatccatcgatacatatatgcaattcgctaaacaatgttatgagcattcaaatccgaaattgtccgatgaagaattatcggataaaatcttttgtgaaaagattctctatgatcctgaaacggataagccttatgcatccaaagtattttttggaccaatttattacttgcgtctgaggcatttaactcaggacaaggcaaccgttagatgtagaggtaaaaagacgaagctcattagacaggcgaatgagggacgaaaacgtggaggaggtatcaagttcggagaaatggagagagactgtttaatagcgcatggtgcagccaatactattacagaagttttgaaagattcggaagaagattatcaagatgtgtatgtttgtgaaaattgtggagacatagcagcacaaatcaagggtattaatacatgtcttagatgttcaaaacttaatctctctcctctcttaacaaaaattgataccacgcacgtatctaaagtatttcttactcaaatgaacgccagaggcgtaaaagtcaaattagatttcgaacgaaggcctccttcgttttataaaccattagataaagttgatctcaagccgtcttttctggtgtaatattctagtttggtagtagatacatatcaatatcatcaaattcgagatccgaattataaaatgggcgtggattgttaactatagaatcggacgtctgatattcgaaaatctgtggagtttcaggttttggtggaggtgtaactgctacttgggatactgaagtctgatattcagaaagctgtggatgttctggttcggcatccaccgatggtgtcacatcactaatcggttcggtaacgtctgtggatggaggtgctacttctacagaacctgtagcctcagttgtcaacggagatacatttttaatgcgagaaaatgtataatttggtaatggtttcttatgtggatctgaagaagaggtaagatatctactagaaagataccgatcacgttctagttctcttttgtagaacttaactttttctttctccgcatctagttgatattccaacctcttcacgttactacgttcagattccaattcacgttcgcatgggttacctccgcagtttttacgagcgatttcacgttcagccttcatgcgtctctccctctctctatcgagtttatcagagcagtctttctgaaggcgatcgaactccataaatttctccaacgctttgattgtttccatagatttccgaagttcagcttttaggactgtgattctttttctttcgaattcacagctggatgtacaaccgtttccattaccgccatctctaagtttcttttctagatcggcaacatttcatccccatgccttttacattcctcgagtctactgtcgtcgaaatatcgttccagctccttttcgacatcaataactttagcacgttgtctctcaagctctcttttgtagttatctgattccctggcacgtttaagatcttcatgcaattgagtcagctcttaacttcctctcttgcttcttcgtcatagtacgcgcaatcactgtgagatccattgttaccacgtctacactcggcgagctcgcgtttaagagattcaatttcccgtttgtattggtccatgtttccattgctaccaccattagatttacaggctgctagttgtcgttcgagatcagaaatacgggttttcttggaattgatttcgtcgatgtacttggcatcgaaacacttattaagttctttttccaattctacgattttatttctttcgcgagtcaattccctcctgtagtaactatctgttttgtcagattcacgctctctacgtagactttcttgcaagttactaatttgttccctagcacgtccgagtttagttttatatgctgaatagagttctgattcatcctttgagcagatctctagcgatcgtttaagattcctaattctagtctttagcctatttacctcctcagaagatgttccgttaccgttgcgtttacactcgttaagctgtctatcaagatccatgattctatctctaagacgttgcatctctctttccatatcagcattgctttcattattacgtctgcagtcactcaactgtctttcaatatctgagattctatctctaagacgtcgcatctctctctgtttcggcattggtttcattattacgtttacagtcgttcaactgtctttcaagatctgatattctagattggagtctgctaatctctgtagcattttcacggcattcactcagttgtctttcaagatctgaaattttagattggagtctgctaatctctgtaagatttcctcctccgctctcgatgcagtcggtcaacttattctctagttctctaatacgcgaacgcagtgcatcaacttcttgcgtgtcttcctggttgcgtgtacattcatcgagatctctaacgcgtcgtcgttcttcctcaagttctctgcgtactacagaaagcgtgtccctatcttgttgatatttagcaatttctgattctagagtactgattttgcttacgtagttactaatagttgtcttggccttatcaagatcctccttgtatttgtcgcattccttgatatccctacgaagtctggacagttcccattcgacattacgacgtttatcgatttcagctcggagatcgtcatcgcgttgttttagccacatacgactgagttcaagttctcgttgacaagatccatctacttttccattcctaatagtatccagttccttttctagttctgaacgcatttctcgttccctatcaagcgattctctcaattctcggatagtcttcttatcaatttctaataaatctgaaccatcatctgtcccattttgaatatccctgtgttctttgatctcttttgtaagtcggtcgattctttcggttttataaacagaatccctttccaaagtcctaatcttactgagtttatcactaagttctgcattcaattcggtgagttttctcttggcttcttccaactctgttttaaactctccactatttccgcattcttcctcgcatttatctaaccattcaattagtttattaataactagttggtaatcagcgattcctatagccgttcttgtaattgtgggaacataattaggatcttctaatggattgtatggcttgatagcatcatctttatcattattagggggatggacaaccttaattggttggtcctcatctcctccagtagcgtgtggttcttcaataccagtgttagtaataggcttaggcaaatgcttgtcgtacgcgggcacttcctcatccatcaagtatttataatcgggttctacttcagaatattcttttctaagagacgcgacttcgggagttagtagaagaactctgtttctgtatctatcaacgctggaatcaatactcaagttaaggatagcgaatacctcatcgtcatcatccgtatcttctgaaacaccatcatatgacatttcatgaagtctaacgtattgataaatagaatcagatttagtattaaacagatccttaacctttttagtaaacgcatatgtatattttagatctccagatttcataatatgatcacatgccttaaatgtcagtgcttccatgatataatctggaacactaatgggtgacgaaaaagatacagcaccatatgctacgttgataaataaatctgaaccactaagtagataatgattaatgttaagaaagaggaaatattcagtgtataggtatgtcttggcgtcatatcttgtactaaacacgctaaacagtttgttaatgtgatcaatttccaatagattaattagagcagcgggaataccaacaaacatattaccacatccgtattttctatgaatatcacatatcatgttaaaaaatcttgatagaagagcgaatatctcgtctgacttaatgagtcgtagttcagcagcaacataagtcataactgtaaatagaacatactttcctgtagtgttgattctagactccacatcaacaccattattaaaaatagttttatatacatctttaatctgctctccgttaatcgtcgaacgttctagtatacggaaacactttgatttcttatctgtagttaatgacttagtgatatcacgaagaatattacgaattacatttcttgtttttcttgagagacctgattcagaactcaactcatcgttccatagtttttctacctcagtggcgaaatctttggagtgcttggtacatttttcaataaggttcgtgacctccatttattataaaaaatttattcaaaacttaactacaatcgggtaattataagatcgtagatctcccatgtggcggaatactaccatctatcgcatgtggatggacagtaggtaatggccatgggaacagtaatgtttgcatatttatctttcttgctagtattactgcatattgtcccaatgtttcgatgtgatgttctaacctatcaactgccgctgtatcacaacaatagtgtccgatgaaattaagattatgatccaatgtgtttaatatatgattatcaagtcttatacgatccgcgtcttttttgacaggatcaggttcttctacaggaagaagtttcggcctcttatgatattcatgtctgggaaacggtggtctagggtgaggctccggtatcggagtgggttttggattataatcatcatcgtctatgacatcatcttcgacttcgatatttattttgctatcttgatgatgtcctgtatcagttgcattttcagcactcgactgaatattagcgcattcattgtctattattaccatatttctaaacccaaaatgtatgtgttgaacatcagtactatcgttgatgagtcttatagcatgaattcgcttatcgttatcgggtttatcttctgtcaccttagcaattccttttttattaaactctacataatcatatccatttctattgtttgttctaatataaacgagtatagcatcattgctaaatttttcaatagtatcaaaaacagaatatcctaaaccatataatatatattcaggaacactcaaactaaatgtccaggattctcctaaatacgtaaactttaatagtgcgaaatcattcaaaaatctaccacttatagatagatagtacataaatgcgtatagtagtctacctatctctttattatgaaaaccggcattacgatcatatatgtcgtgatatacctgtgatccgtttacgttaaaccataaatacatgggtgatcctataaacatgaatttatttctaattctcagagctatagttaattgaccgtgtaatatttgcttacatgcatacttgatacgcttattaataagatttttatcattgctcgttatttcagaatcgtatatataaggagtaccatcgtgattcttaccagatattatacaaaatactatatataaaatatattgacccacgttagtaatcatataaatgtttaacgttttaaattttgtattcaatgatccattatcatacgctatcatggtcttgtaatattcattctttaaaatataatattgtgttagccattgcattggagctcctaatggagattttctattctcatccattttaggataggctttcataaagtccctaataacttcgtgaataatgtttctatgttttctactgatgcatgtatttgcttcgatttttttatcccatgtttcatctatcatagatttaaacgcagtaatgctcgcaacattaacatcttgaaccgttggtacaattccgttccataaatttataatgttcgccatttatataactcattttttgaatatacttttaattaacaaaagagttaagttactcatatggacgccgtccagtctgaacatcaatctttttagccagagatatcatagccgctcttagagtttcagcgtgattttccaacctaaatagaacttcatcgttgcgtttacaacacttttctatttgttcaaactttgttgttacattagtaatctttttttccaaattagttagccgttgtttgagagtttcctcattgtcgtcttcatcggctttaacaattgcttcgcgtttagcctctggctttttagcagcctttgtagaaaaaaattcagttgctggaattgcaagatcgtcatctccggggaaaagagttccgtccatttaaagtacagattttagaaactgacactctgcgttatttatatttggtacaacacatggattataaatattgatgttaataacatcagaaaatgtaaagtctatacattgttgcatcgtgttaaattttctaatggatctagtattattgggtccaacttctgcctgaaatccaaatatggaagcggatacaaaaccgtttcctggataaaccacacatctccacttttgctttacatcagaaattgtgtcgttgacatcttgaactctcctatctaatgccggtgttccacctatagattttgaatattcgaatgctgcatgagtagcattaaattccttaatattgccataattttcatatattgagtaaccctggataaaaagtaaacacaccgcagccgtcgctaccacaataaaaaaaattgatagagagttcatttataatctattagaagctgacaaaatttttttacacgcatcagacaatgctttaataaatagttcaacatctacttttgtcatatcgaaccgatggtatgattctaacctagaattacatccgaaaaagttgactatgttcatagtcattaagtcattaacaaacaacattccagactctggattataagacgatactgtttcgtcacaattacctaccttaatcatgtgattatgaatattggctattagagcaccttctaagaaatctataatatctttgaaacacgatttaaaatcaaaccacgaatatacttctacgaagaaagttagtttacccataggagaaataactataaatggagatctaaatacaaaatccggatctatgatagttttaacattattatattctctattaaatacctccacatctaaaaatgttaattttgaaactatgtcttcgtttattaccgtacctgaactaaacgctataagctctattgtttgagaactctttaaacgatattcttgaaatacatgtaacaaagtttcctttaactcggtcggtttatctaccatagttacagaatttgtatccttatctataatataataatcaaaatcgtataaagttatataattatcgcgttcagattgtgatcttttcaaatagactaaaaaccccatttctctagtaagtatcttatgtatatgtttgtaaaatatcttcatggtgggaatatgctctaccgcagttagccattcctcattgacagcggtagatgtattagacaaaactattccaatgtttaacaagggccattttacgagattattaaatccttgtttgataaatgtagccaatgagggttcgagttcaacgacgattgaattctcttcccgcggatgctgcatgatgaacgacgggatgttgttcgattgatttggaattctttttcgactttttgtttatattaaatattttaaaatttatagcggatagcaattcatgtaccacggataatgtagacgcgtattgcgcatcgatatctttattattagataaatttatcaataaatgtgagaagtttgcctcgttaaggtcttccatttaaatattatataaacatttgtgtttgtatcttattcgtcttttatggaatagttttttactagtaaagctgcaattacacactttgtccgtaaaacataaatataaacaccagcttttatcaatcgttccaaaaagtcgacggcggacatttttaacatggcatctattttaaatacacttaggtttttggaaaaaacatcattttataattgtaacgattcaataactaaagaaaagattaagattaaacataagggaatgtcatttgtattttataagccaaagcattctaccgttgttaaatacttgtctggaggaggtatatatcatgatgatttggttgtattggggaaggtaacaattaataatctaaagatgatgctattttacatggatttatcatatcatggagtgacaagtagtggagcaatttacaaattgggatcgtctatcgatagactttctctaaataggactattgttacaaaagttaataattatgatgatacattttttgacgacgatgattgatcgctattgcacaattttgtttttgtactttctaatatagtgtttaggttctttttcatatgagaatattgatttactaaaatatctatgtttaacttttgttctatgacgtccttatcggcggtatcggtacatatacgtaattcaccttcacaaaatacggagtcttcgataataatagccaatcgattattggatctagctgtctgtatcatattcaacatgtttaatatatcctttcgtttcccctttacaggcatcgatcgtagcatattttccgcgtctgatatggaaatgttaaaactacaaaaatgcgtaatgttagcccgtcctaatattggtacgtgtctataagtttggcatagtagaataatagacgtgtttaaatgccttccaaagtttaagaattctattagagtattgcattttgatagtttatcgcctacatcatcaaaaataagtaaaaagtgtgctgattttttatgattttgtgcgacagcaatacatttttctatgttacttttagttcgtatcagattatattctagagattcctgactactaacgaaattaatatgatttggccaaatgtatccatcataatctgggttataaacgggtgtaaacaagaatatatgtttatattttttaactagtgtagaaaacagagatagtaaatagatagtttttccagatccagatcctcctgttaaaaccattctaaacggcatttttaataaattttctcttgaaaattgtttttcttggaaacaattcataattatatttacagttactaaattaatttgataataaatcaaaatatggaaaactaaggttgttagtagggaggagaacaaagaaggcacatcgtgatataaataacatttattatcatgatgacaccagaaaacgacgaagagcagacatctgtgttctccgctactgtttacggagacaaaattcagggaaagaataaacgcaaacgcgtgattggtctatgtattagaatatctatggttatttcactactatctatgattaccatgtccgcgtttctcatagtgcgcctaaatcaatgcatgtctgctaacgaggctgctattactgacgccgctgttgccgttgctgctgcatcatctactcatagaaaggttgcgtctagcactacacaatatgatcacaaagaaagctgtaatggtttatattaccagggttcttgttatatattacattcagactaccagttattctcggatgctaaagcaaattgcactgcggaatcatcaacactacccaataaatccgatgtcttgactacctggctcattgattatgttgaggatacatggggatctgatggtaatccaattacaaaaactacatccgattatcaagattctgatgtatcacaagaagttagaaagtatttttgtgttaaaacaatgaactaatatttatttttgtacattaataaatgaaatcgcttaatagacaaactgtaagtaggtttaagaagttgtcggtgccggccgctataatgatgatactctcaaccattattagtggcataggaacatttctgcattacaaagaagaactgatgcctagtgcttgcgccaatggatggatacaatacgataaacattgttatttagatactaacattaaaatgtctacagataatgcggtttatcagtgtcgtaaattacgagctagattgcctagacctgatactagacatctgagagtattgtttagtattttttataaagattattgggtaagtttaaaaaagaccaatgataaatggttagatattaataatgataaagatatagatattagtaaattaacaaattttaaacaactaaacagtacgacggatgctgaagcgtgttatatatacaagtctggaaaactggttaaaacagtatgtaaaagtactcaatctgtactatgtgttaaaaaattctacaagtgacaacaaaaaatgaattaataataagtcgttaacgtacgccgccatggacgccgcgtttgttattactccaatgggtgtgttgactataacagatacattgtatgatgatctcgatatctcaatcatggactttataggaccatacattataggtaacataaaaactgtccaaatagatgtacgggatataaaatattccgacatgcaaaaatgctactttagctataagggtaaaatagttcctcaggattctaatgatttggctagattcaacatttatagcatttgtgccgcatacagatcaaaaaataccatcatcatagcatgcgactatgatatcatgttagatatagaagataaacatcagccattttatctattcccatctattgatgtttttaacgctacaatcatagaagcgtataacctgtatacagctggagattatcatctaatcatcaatccttcagataatctgaaaatgaaattgtcgtttaattcttcattctgcatatcagacggcaatggatggatcataattgatgggaaatgcaatagtaattttttatcataaaagttgtaaagtaaataataaaacaataaatattgaactagtagtacgtatattgagcaatcagaaatgatgctggtacctcttatcacggtgaccgtagttgcgggaacaatattagtatgttatatattatatatttgtaggaaaaagatacgtactgtctataatgacaataaaattatcatgacaaaattaaaaaagataaagagttctaattccagcaaatctagtaaatcaactgatagcgaatcagactgggaggatcactgtagtgctatggaacaaaacaatgacgtagataatatttctaggaatgagatattggacgatgatagcttcgctggtagtttaatatgggataacgaatccaatgttatggcgcctagcacagaacacatttacgatagtgttgctggaagcacgctgctaataaataatgatcgtaatgaacagactatttatcagaacactacagtagtaattaatgaaacggagactgttgaagtacttaatgaagataccaaacagaatcctaactattcatccaatcctttcgtaaattataataaaaccagtatttgtagcaagtcaaatccgtttattacagaacttaacaataaatttagtgagaataatccgtttagacgagcacatagcgatgattatcttaataagcaagaacaagatcatgaacacgatgatatagaatcatcggtcgtatcattggtgtgattagtttcctttttataaaattgaagtaatatttagtattattgctgccgtcacgttgtacaaatggagatattccctgtattcggcatttctaaaattagcaattttattgctaataatgactgtagatattatatagatacagaacatcaaaaaattatatctgatgagatcaatagacagatggatgaaacggtacttcttaccaacatcttaagcgtagaagttgtaaatgacaatgagatgtaccatcttattcctcatagattatcgacgattatactctgtattagttctgtcggaggatgtgttatctctatagataatgacatcaatggcaaaaatattctaacctttcccattgatcatgctgtaatcatatccccactgagtaaatgtgtcgtagttagcaagggtcctacaaccatattggttgttaaagcggatatacctagcaaacgattggtaacatcgtttacaaacgacatactatatgtaaacaatctgtcactgattaattatttgccgttgtctgtattcattattagacgagtcaccgactatttggatagacacatatgcgatcagatatttgctaataataagtggtattcccttataaccatcgacgataagcaatatcctattccatcaaactgtataggtatgtcctctgccaagtacataaattctagcatcgagcaagatactttaatccatgtttgtaacctcgagcatccgttcgactcagtatacaaaaaaatgcagtcgtacaattctctacctatcaaggaacaaatattgtacggtagaattgataatataaatatgagcattagtatttctgtggattaatagatttctagtatggggatcattaatcatctctaatctctaaatacctcataaaacgaaaaaaaagctattatcaaatactgtacggaatggattcattctcttctctttttatgaaactctgttgtatatctactgataaaactggaagcaaaaaatctgatagaaagaataagaataagatcaaggattatatggaacacgattattataaaataacaatagttcctggttcctcttccacgtctactagctcgtggtattatacacatgcctagtaatagtctctttgcgttgacggaaagcagactagaaataacaggctaaaatgttcagacaccataatagttcccaacccagataataacagagttccatcaacacattcctttaaactcaatcccaaacccaaaaccgttaaaatgtatccggccaattgatagtagataatgaggtgtacagcgcatgataatttacacagtaaccaaaatgaaaatactttagtaattataagaaatatagacggtaatgtcatcatcaacaatccgataatatgcctgagagtaaacattgacggataaaacaaaaatgctccgcataactctatcatggcaataacacaaccaaatacttgtaagattcctaaattagtagaaaatacaacgaatatcgatgtataagtgatctcgagaaataataagaataaagtaatgcccgtaaagataaacatcaacattgtttggtaatcattaaaccaattagtatgaagttgaactaatttcacagtagattttattccagtgttatcctcgcatgtataagtacctggtaagatatctttatattccataatcaatgagacatcactatctgataacgaatgaagtctagcactagtatgccatttacttaatattgtcgtcttggaagttttattataagttaaaatatcatggttatccaatttccatctaatatactttgtcggattatctatagtacacggaataatgatggtatcattacatgctgtatactctatggtctttgtagttgttataacaaccaacgtatagaggtatatcaacgatattctaactcttgacattttttatttatttaaaatgatacctttgttatttattttattctattttgctaacggtattgaatggcataagtttgaaacgagtgaagaaataatttctacttacttattagacgacgtattatacacgggtgttaatggggcggtatacacattttcaaataataaactaaacaaaactggtttaactaataataattatataacaacatctataaaagtagaggatgcggataaggatacattagtatgcggaaccaataacggaaatcccaaatgttggaaaatagacggttcagacgacccaaaacatagaggtagaggatacgctccttatcaaaatagcaaagtaacgataatcagtcacaacggatgtgtactatctgacataaacatatcaaaagaaggaattaaacgatggagaagatttgacggaccatgtggttatgatttattcacggcggataacgtaattccaaaagatggtttacgaggagcattcgtcgataaagacggtacttatgacaaagtttacattcttttcactgatactatcggctcaaagagaattgtcaaaattccgtatatagcacaaatgtgcctaaacgacgaaggtggtccatcatcattgtctagtcatagatggtcgacgtttctcaaagtcgaattagaatgtgatatcgacggaagaagttatagacaaattattcattctagaactataaaaacagataatgatacgatactatatgtattcttcgatagtccttattccaagtccgcattatgtacctattctatgaataccattaaacaatctttttctacgtcaaaattggaaggatatacaaagcaattgccgtctccagctcctggtatatgtttaccagctggaaaagttgttccacataccacgtttgaagtcatagaacaatataatgtactagatgatattataaagcctttatctaaccaacctatcttcgaaggaccgtctggtgttaaatggttcgatataaaggagaaggaaaatgaacatcgggaatatagaatatacttcataaaagaaaattctatatattcgttcgatacaaaatctaaacaaactcgtagctcgcaagtcgatgcgcgactattttcagtaatggtaactgcgaaaccgttatttatagcagatatagggataggagtaggaatgccacaaatgaaaaaaatacttaaaatgtaatcttaatcgagtacaccacacgacaatgaacaaacataagacagattatgctggttatgcttgctgcgtaatatgcggtctaattgtcggaattatttttacagcgacactattaaaagttgtagaacgtaaattagttcatacaccattaatagataaaacgataaaagatgcatatattagagaagattgtcctactgactggataagctataataataaatgtatccatttatctactgatcgaaaaacctgggaggaaggacgtaatgcatgcaaagctctaaattcaaattcggatctaattaagatagagactccaaacgagttaagttttttaagaagccttagacgaggctattgggtaggagaatccgaaatattaaaccagacaaccccatataattttatagctaagaatgccacgaagaatggaactaaaaaacggaaatatatttgtagcacaacgaatactcccaaactgcattcgtgttacactatataacaattacactacatttttatcataccactacttcggttagatgttttagaaaaaaataaatatcgccgtaccgttcttgtttttataaaaataacaattaacaattatcaaattttttctttaatattttacgtggttgaccattcttggtggtaaaataatctcttagtgttggaatggaatgctgtttaatgtttccacactcatcgtatattttgacgtatgtagtcacatcgtttacgcaatagtcagactgtagttctatcatgcttcctacatcagaaggaggaacagttttaaagtctcttggttttaatctattaccgttagttttcatgaaatcctttgttttatccacttcacattttaaataaatgtccactatacattcttttgttaattttactagatcgtcatgggtcatagaatttataggttccgtagtccatggatccaaactagcaaacttcgcgtatacggtatcgcgattagtgtatacaccaactgtatgaaaattaagaaaacagtttaataaatcaacagaaatatttaatcctccgtttgatacagatgcgccatatttatggatttcggattcacacgttgtttgtctgaggtgttcgtctagtgttgcttctacgtaaacttcgattcccatatattctttattgtcagaatcgcataccgatttatcatcatacactgtttgaaaactaaatggtatacacatcaaaataataaataataacgagtacattctgcaatattgttatcgtaattggaaaaatagtgttcgagtgagttggattatgtgagtattggattgtatattttattttatattttgtaataagaataaaatgctaatgtcaagtttattccaatagatgtcttattaaaaacatatataataaataacaatggctgaatggcataaaattatcgaggatatctcaaaaaataataagttcgaggatgccgccatcgttgattacaagactacaaagaatgttctagctgctattcctaacagaacatttgccaagattaatccgggtgaaattattcctctcatcactaatcgtaatattctaaaacctcttattggtcagaaatattgtattgtatatactaactctctaatggatgagaacacgtatgctatggagttgcttactgggtacgcccctgtatctccgatcgttatagcgagaactcataccgcacttatatttttgatgggtaagccaacaacatccagacgtgacgtgtatagaacgtgtagagatcacgctacccgtgtacgtgcaactggtaattaaaataaaaagtaatattcatatgtagtgtcaattttaaatgatgatgatgaaatggataatatccatattgacgatgtcaataatgccggtattggcatacagttcatcgatttttagatttcattcagaggatgtggaattatgttatgggcatttgtattttgataggatctataatgtagtaaatataaaatataatccgcatattccatatagatataattttattaatcgcacgttaaccgtagatgaactagacgataatgtcttttttacacatggttattttttaaaacacaaatatggttcacttaatcctagtttgattgtctcattatcaggaaacttaaaatataatgatatacaatgctcagtaaatgtatcgtgtctcattaaaaatttggcaacgagtacatctactatattaacatctaaacataagacttattctctacatcggtccacgtgtattactataataggatacgattctattatatggtataaagatataaatgacaagtataatgacatctatgattttactgcaatatgtatgctaatagcgtctacattgatagtgaccatatacgtgtttaaaaaaataaaaatgaactcttaattatgctatgctattagaaatggataaaatcaaaattacggttgattcaaaaattggtaatgttgttaccatatcgtataacttggaaaagataactattgatgtcacacctaaaaagaaaaaagaaaaggatgtattattagcgcaatcagttgctgtcgaagaggcaaaagatgtcaaggtagaagaaaaaaatattatcgatattgaagatgacgatgatatggatgtagaaagcgcgtaatacgatctataaaaataagtatataaatactttttatttactgtactcttactgtgtagtggtgataccctactcgattatttttttaaaaaaaaaatacttattctgattcttctagccatttccgtgttcgtttgaatgccacatcgacgtcaaagataggggagtagttgaaatctagttctgcattgttggtacgcacctcaaatgtagtgttggatatcttcaacgtatagttgttgagtagtgatggttttctaaatagaattctcttcatatcattcttgcacgcgtacatttttagcatccatcttggaatcctagatccttgttctattcccaatggtttcatcaatagaagattaaacatatcgtacgaacacgatggagagtaatcgtagcaaaagtaagcatttcctttaatcttagatcccggatactggatatattttgcagccaacacgtgcatccatgcagcatttcctacatatacccggctatgcaccgcgtcatcatcgactgtacgatacataatgttaccgtgttgcttacattgctcgtaaaagactttcatcaatttgtctccttctccgtaaattccagtgggtcttaggcaacaagtatacaattttgctccattcatgattacggaattattggctttcataaccagttgctcggccatacgtttactttttgcgtatacatgtcctggtgatatatcataaagggtatgctcatggccgatgaatggatcaccgtgtttattgggtcctattgcttccatgctactagtatagatcaaatacttgattcctaggtccacacaagctgccaaaatagtctgtgttccataatagtttactttcatgatttcattatcggtgtattttccaaatacatccactagagcagccgtatgaataatcagatttaccccatctagcgcttctctcaccttatcaaagtcgtttatatcacattgtatatagtttataaccttaactttcgaggttattggttgtggatcttctacaatatctatgactctgatttcttgaacatcatctgcactaattaacagttttactatatacctgcctagaaatccggcaccaccagtaaccgcgtacacggccattgctgccactcataatatcagactacttattctattttactaaataatggctgtttgtataatagaccacgataatatcagaggagttatttactttgaaccagtccatggaaaagataaagttttaggatcagttattggattaaaatccggaacgtatagtttgataattcatcgttacggagatattagtcaaggatgtgattccataggcagtccagaaatatttatcggtaacatctttgtaaacagatatggtgtagcatatgtttatttagatacagatgtaaatatatttacaattattggaaaggcgttatctatttcaaaaaatgatcagagattagcgtgtggagttattggtatttcttacataaatgaaaagataatacattttcttacaattaacgagaatggcgtttgatatatcagttaatgcgtctaaaacaataaatgcattagtttacttttctactcagcaaaataaattagtcatacgtaatgaagttaatgatacacactacactgtcgaatttgatagggacaaagtagttgacacgtttatttcatataatagacataatgacaccatagagataagaggggtgcttccagaggaaactaatattggttgcgcggttagtatgacttacttgtataataagtatagttttaaactgattttagcagaatatataagacacagaaatactatatccggcaatatttattcggcattgatgacactagatgatttggctattaaacagtatggagacattgatctattatttaatgagaaacttaaagtagactccgattcgggactatttgactttgtcaactttgtaaaggatatgatatgttgtgattctagaatagtagtagctctatctagtctagtatctaaacattgggaattgacaaataaaaaatataggtgtatggcattagccgaacatatatctgatagtattccaatatctgagctatctagactacgatacaatctatgtaagtatctacgcggacacactgagagcatagaggataaatttgattattttgaagacgatgattcgtctacatgttctgccgtaaccgacagggaaacggatgtataattttttttatagcgtgaaggatatgataaaaaatataattgttgtatttatcccattccaatcaccttatatgattctgtaacacaataaaggagtcttatagatgtatagaggtcagatactggtttgataaactgtttattccacataagtatgtttgactttatggttagacccgcatactttaacaaatcactgaaaattggagttaggtattgacctctcagaatcagttgccgttctggaacattaaatgtattttttatgatatactccaacgcatttatgtgggcatacaacaagtcattactaatggaatattccaagagttttagttgtctagtatttaacaagagaagagatttcaacagactgtttatgaactcgaatgccgcctcattgtcgcttatattgatgatgtcgaattctcccaatatcatcaccgatgagtagctcatcttgttatcgggatccaagttttctaaagatgtcattaaaccctcgatcatgaatggatttatcatcatcgtttttatgttggacatgagcttagtccgtttgtccacatctatagaagatgatttctgaattatttcatatatctctctctttaactccaggaacttgtcaggatggtctactttaatatgttctcgtctaagagatgaaaatctttggatggttgcacgcgacttttctctaaaggatgacgttgcccaagatcctctcttaaatgaatccatcttatccttggacaagatggacagtctattttccttagatggtttaatatttttgttacccatgatctataaaggtagacctaatcgtctcggatgaccatatatttattttcagttttattatacgcataaattgtaaaaaatatgttaggtttacgaaaatgtctcgtggggcattaatcgtttttgaaggattggacaaatctggaaaaacaacacaatgtatgaacatcatggaatcaataccttcaaacacaataaaataccttaactttcctcagagatccactgtcactggaaagatgatagatgactatctaactcgtaaaaaaacctataatgatcatatagttaatctattattttgtgcaaatagatgggagtttgcatcttttatacaagaacaactagaacagggaattactttaatagttgatagatacgcattttctggagtagcgtatgccgccgctaaaggcgcgtcaatgactctcagtaagagttatgaatctggattgcctaaacccgacttagttatattcttggaatctggtagcaaagaaattaatagaaacgtcggtgaggaaatttatgaagatgttacattccaacaaaaggtattacaagaatataaaaaaatgattgaagaaggagatattcattggcaaattatttcttctgaattcgaggaagatgtaaagaaggagttgattaagaatatagttatagaggctatacacacggttactggaccagtggggcaactgtggatgtaatagtgaaattacattttttataaatagatgttagtacagtgttataaatggatgaagcatattactctggcaacttggaatcagtactcggatacgtgtccgatatgcataccgaactcgcatcaatatctcaattagttattgccaagatagaaactatagataatgatatattaaacaaggacattgtaaattttatcatgtgtagatcaaacttggataatccatttatctctttcctagatactgtatatactattatagatcaagagaactatcagactgagttgattaattcattagacgacaatgaaattatcgattgtatagttaataagtttatgagcttttataaggataacctagaaaatatagtagatgctatcattactctaaaatatataatgaataatccagattttaaaactacgtatgccgaagtactcggttccagaatagccgatatagatattaaacaagtgatacgtaagaatatactacaattgtctaataatatccgcgaacgatatttgtgaaaatattaaaaaaaaatactttttttattaaatgacgtcttttcgtgaatttagaaaattatgctgtgctatatatcacgcatcaggatataaagaaaaatctaaattaattagagactttataacagatagggatgataaatatttgatcattaagctattgcttcccggattagacgatagaatttataacatgaacgataaacaaattataaaattatatagtataatatttaaacaatctcaggaagatatgctacaagatttaggatacggatatataggagacactattaggactttcttcaaagagaacacagaaatccgtccacgagataaaagcattttaactttagaagaagtggatagttttttaactacgttatcatccgtaactaaagaatcgcatcaaataaaattattgactgatgtagcatctgtttgtacatgtaatgatttaaaatgtgtagtcatgcttattgataaagatctaaaaattaaagcgggtcctcggtacgtacttaacgctattagtcctaatgcctatgatgtgtttagaaaatctaataacttgaaagagataatagaaaattcatctaaacaaaatctagactctatatctatttctgttatgactccaattaatcccatgttagcggaatcgtgtgattctgtcaataaggcgtttaaaaaatttccatcaggaatgtttgcggaagtcaaatacgatggtgaaagagtacaagttcataaaaataataacgagtttgccttctttagtagaaacatgaaaccagtactctctcataaagtggattatctcaaagaatacataccgaaagcatttaaaaaagctacgtctatcgtattggattctgaaattgttcttgtagacgaacataatgtaccgctcccgtttggaagtttaggtatacacaaaaagaaagaatataaaaactctaacatgtgtttgttcgtgtttgactgtttgtactttgatggattcgatatgacggacattccattgtacgaacgaagatcttttctcaaagatgttatggttgaaatacccaatagaatagtattctcagagttgacgaatattagtaacgagtctcagttaactgacgtattggatgatgcactaacgagaaaattagaaggattggtcttaaaagatattaatggagtatacgaaccgggaaagagaagatggttaaaaataaagcgagactatttgaacgagggttccatggcagattctgccgatttagtagtactaggtgcctactatggtaaaggagcaaagggtggtatcatggcagtctttctaatgggttgttacgacgatgaatccggtaaatggaagacggttaccaagtgttcaggacacgatgataatacgttaagggagttgcaagaccaattaaagatgattaaaattaacaaggatcccaaaaaaattccagagtggttagtagttaataaaatctatattcccgattttgtagtagaggatccgaaacaatctcagatatgggaaatttcaggagcagagtttacatcttccaagtcccataccgcaaatggaatatccattagatttcctagatttactaggataagagaggataaaacgtggaaagaatctactcatctaaacgatttagtaaacttgactaaatcttaatagttacatacaaactgaaaattaaaataacactatttagttggtggtcgccatggatggtgttattgtatactgtctaaacgcgctagtaaaacatggcgaggaaataaatcatataaaaaatgatttcatgattaaaccatgttgtgaaagagtttgtgaaaaagtcaagaacgttcacattggcggacaatctaaaaacaatacagtgattgcagatttgccatatatggataatgcggtatccgatgtatgcaattcactgtataaaaagaatgtatcaagaatatccagatttgctaatttgataaagatagatgacgatgacaagactcctactggtgtatataattattttaaacctaaagatgccattcctgttatcatatctataggaaaggataaagatgtctgtgaactattaatctcatcagacatatcgtgtgcatgcgtggagttaaattcatatcacgtagccattcttcccatggatgtttccttttttaccaaaggaaatgcatcattgattattctcctgtttgatttctctatcgatgcggcacctctcttaagaagtgtaaccgataataatgttattatatctagacaccagcgtctacatgacgagcttccgagttccaattggttcaagttttacataagtataaagtccgactattgttctatattatatatggttgttgatggatctgtgatgcatgcgatagctgataatagaactcacgcaattattagcaaaaatatattagacaatactacgattaacgatgagtgtagatgctgttattttgaaccacagattaggattcttgatagagatgagatgctcaatggatcatcgtgtgatatgaacagacattgtattatgatgaatttacctgatgtaggcgaatttggatctagtatgttggggaaatatgaacctgacatgattaagattgctctttcggtggctggtaatttaataagaaatcgagactacattcccgggagacgaggatatagctactacgtttacggtatagcctctagataatttttttaagcacgaaataaaaaacataattttaaaccaatctatttcatactattttgtgtgatcaccatggacataaagatagatattagtatttctggtgataaatttacggtgactactaggagggaaaatgaagaaagaaaaaaatatctacctctccaaaaagaaaaaactactgatgttatcaaacctgattatcttgagtacgatgacttgttagatagagatgagatgtttactattctagaggaatattttatgtacagaggtctattaggcctcagaataaaatatggacgactctttaacgaaattaaaaaattcgacaatgatgcggaagaacaattcggtactatagaagaactcaagcagaaacttagattaaattctgaagagggagcagataactttatagattatataaaggtacaaaaacaggatatcgtcaaacttactgtatacgattgcatatctatgataggattgtgtgcatgcgtggtagatgtttggagaaatgagaaactgttttctagatggaaatattgtttacgagcgattaaactgtttattgatgatcacatgcttgataagataaaatctatactgcagaatagactagtatatgtggaaatgtcatagaaagttaaaagttaatgagagcaaaaatatataaggttgtattccatatttgttatttttttctgtaatagttagaaaaatacattcgatggtctatctatcagattattatgtgttataaggtactttttctcataataaactagagtatgagtaagatagtgtttttcaaaacatataaatctaaaattgatggatgagatatacagctattaatttcgaaaatatattttaatctgataactttaaacatggatttttaatggtggtttaacgttttaaaaaaagattttgttattgtagtatatgataatattaaaagatggatataaagaatttgctgactgcatgtactattttttacattactacattggctacggcagatatacctacttcgtcactgccacacgctccggtaaacggggcatgtgacgagggagaatatcttgataagaggcataatcaatgttgtaatcagtgtccacctggagaatttgccaaggttagatgtaatggtaacgataacacaaaatgtgaacgctgcccacctcatacatataccgcaatccccaattactctaatggatgtcatcaatgtagaaaatgcccaacaggatcatttgataaggtaaagtgtaccggaacacagaacagtaaatgttcgtgtcttcctggttggtattgcgctactgattcttcacagactgaagattgtcgagattgtataccaaaaaggagatgtccatgcggatactttggtggaatagatgaacaaggaaatcctatttgtaaatcgtgttgtgttggtgaatattgcgactacctacgtaattatagacttgatccatttcctccatgcaaactatctaaatgtaattaattatgattttgatgataatgttaccatacattatatcgctacttggttagtgtattattcagtatgaagacctattaataattacttatcttttgacgatcttgttataattataatataaaaatacttatggcatagtaactcataattgctgacgcgataaattcgtaataatctgttttgttcaaatttttataaggaatctacaggcataaaaataaaaatataatttataatatactcttacagcgcgccatcatgaataacagcagtgaattgattgctgttattaatggatttagaaatagtggacgattttgtgatattaatatagttattaatgatgaaaggataaacgctcacagactcatcctatctggagcctccgaatatttttccattctgttttccaataattttatcgattctaatgaatacgaagttaatctaagtcatttagattatcaaagtgttaacgatttgatcgattacatttatgggatacctttgagcctaactaacgataacgtgaaatatattctttcaaccgctgattttttacaaattggatctgctattacggagtgtgaaaattacatacttaaaaatctttgttctagaaactgtatcgatttctacatatacgctgataaatataataacaagaaaatagaatcagcgtcgtttaacacaatattacaaaatattttgagactcatcaacgatgaaaactttaaatacttaacagaggaatcaatgataaaaattttaagcgatgatatgttaaatataaaaaatgaggatttcgccccactaattctcattaaatggttagagagtactcaacaaccatgcaccgtcgagttacttaaatgcctcagaatatcattgctttccccacaagttataaaatcactttatagtcatcgactggttagttcaatctacgaatgtataacattcttaaacaatatagcattcttggatgaatcatttcctagataccatagcatcgagttgatatctatcggtataagtaattcgcatgataagatttccataaactgctacaatcataaaaaaaatacatgggaaatgatatcttcacgtagatataggtgtagtttcgcagtggccgtcctggataatattatctatatgatgggtggatatgatcagtccccgtatagaagttcaaaggttatagcgtacaatacatgtacaaattcttggatatatgatataccagagctaaaatatcctcgttctaattgtgggggactggctgatgacgaatacatttattgtataggcggcatacgcgatcaggattcatcgttgacatctagtattgatagatggaagccatcaaaaccatattggcagaagtatgctaaaatgcgcgaaccaaaatgtgatatgggggttgcgatgttaaacggattaatatatgttataggtggaatcgttaaaggtgacacgtgtaccgacgcactagagagtttatcagaagatggatggatgaagcatcaacgtcttccaataaaaatgtccaatatgtcgacgattgttcatgatggcaagatttatatatctggaggttacaacaatagtagtgtagttaatgtaatatcgaatctagtccttagctataattcgatatatgatgaatggaccaaattatcatcattaaacattcctagaattaatcccgctctatggtcagcgcataataaattatatgtaggaggaggaatatctgatgatgttcgaactaatacatctgagacatacgacaaagaaaaagattgttggacattggataatggtcacgtgttaccacgcaattatataatgtataaatgcgaaccgattaaacataaatatccattggaaaaaacacagtacacgaatgattttctaaagtatttggaaagttttataggtagttgatagaacaaaatacataattttgtaaaaataaatcactttttatactaatatgacacgattaccaatacttttgttactaatatcattagtatacgctacaccttttcctcagacatctaaaaaaataggtgatgatgcaactctatcatgtaatcgaaataatacaaatgactacgttgttatgagtgcttggtataaggagcccaattccattattcttttagctgctaaaagcgacgtcttgtattttgataattataccaaggataaaatatcttacgactctccatacgatgatctagttacaactatcacaattaaatcattgactgctagagatgccggtacttatgtatgtgcattctttatgacatcaactacaaatgacactgataaagtagattatgaagaatactccacagagttgattgtaaatacagatagtgaatcgactatagacataatactatctggatctacacattcaccggaaactagttctgagaaacctgattatatagataattctaattgctcgtcggtattcgaaatctaagcttaaaaattgaaattttattttttttttttggaatataaataagctcgaagtcgaccaccatggtgggtgaggatagcgtgctgatcaccgagaacatgcacatgaaactgtacatggagggcaccgtgaacgaccaccacttcaagtgcacatccgagggcgaaggcaagccctacgagggcacccagaccatgaagatcaaggtggtcgagggcggccctctccccttcgccttcgacatcctggctaccagcttcatgtacggcagcaaaacctttatcaaccacacccagggcatccccgacttctttaagcagtccttccctgagggcttcacatgggagaggatcaccacatacgaagacgggggcgtgctgaccgctacccaggacaccagcctccagaacggctgcctcatctacaacgtcaagatcaacggggtgaacttcccatccaacggccctgtgatgcagaagaaaacactcggctgggaggccagcaccgagatgctgtaccccgctgacagcggcctgagaggccatagccagatggccctgaagctcgtgggcgggggctacctgcactgctccctcaagaccacatacagatccaagaaacccgctaagaacctcaagatgcccggcttctacttcgtggacaggagactggaaagaatcaaggaggccgacaaagagacctacgtcgagcagcacgagatggctgtggccaggtactgcgacctgcctagcaaactggggcacagctgattaattaatttttatcgatctaattcaacaatgtctggagagctcggtaccaagcttcgcaggatcccgactccggaaccaattactgataaagaagatcatacagttacagacactgtctcatacactacagtaagtacatcatctggaattgtcactactaaatcaaccaccgatgatgcggatctttatgatacgtacaatgataatgatacagtaccaccaactactgtaggcggtagtacaacctctattagcaattataaaaccaaggactttgtagaaatatttggtattaccgcattaattatattgtcggccgtggcaattttctgtattacatattatatatataataaacgttcacgtaaatacaaaacagagaacaaagtctagatttttgacttacataaatgtctgggatagtaaaatctatcatattgagcggaccatctggtttaggaaagacagccatagccaaaagactatgggaatatatttggatttgtggtgtcccataccactagatttcctcgtcctatggaacgagaaggtgttgattaccattacgttaacagagaggccatctggaagggaatagccgccggaaactttctagaacatactgagtttttaggaaatatttacggaacttctaaaacagctgtgaatacagcggctattaataatcgtatttgtgtgatggatctaaacatcgacggtgttagaagtcttaaaaatacgtacctaatgccttactcggtgtatataagacctacctctcttaaaatggttgagaccaagcttcgtcgtagaaacactgaagctaacgatgagattcatcgtcgtgtgatgttggcaaaaactgacatggatgaggcaggtgaagccggtctattcgacactattatcattgaagatgatgtgaatttagcatatagtaagttaattcagatactacaggaccgtattagaatgtattttaacactaattagagacttaagacttaaaacttgataattaataatataactcgtttttatatgtgtctatttcaacgtctaatgtattagttaaatattaaaacttaccacgtaaaacttaaaatttaaaatgatatttcattgacagatagatcacacattatgaactttcaaggacttgtgttaactgacaattgcaaaaatcaatgggtcgttggaccattaataggaaaaggtggattcggtagtatttatactactaatgacaataattatgtagtaaaaatagagcccaaagctaacggatcattatttaccgaacaggcattttatactagagtacttaaaccatccgttatcgaagaatggaaaaaatctcacaatataaagcacgtaggtcttatcacgtgcaaggcatttggtctatacaaatccattaatgtggaatatcgattcttggtaattaatagattaggtgcagatctagatgcggtgatcagagccaataataatagactaccaaaaaggtcggtgatgttgatcggaatcgaaatcttaaataccatacaatttatgcacgagcaaggatattctcacggagatattaaagcgagtaatatagtcttagatcaaatagataagaataaattatatctagtggattacggattggtttctaaattcatgtctaatggcgaacatgttccatttataagaaatccaaataaaatggataacggtactctagaatttacacctatagattcgcataaaggatacgttgtatctagacgtggagatctagaaacacttggatattgtatgattagatggttgggaggtatcttaccatggactaagatatctgaaacaaagaattgtgcattagtaagtgccacaaaacagaaatatgttaacaatactgcgactttgttaatgaccagtttgcaatatgcacctagagaattgctgcaatatattaccatggtaaactctttgacatattttgaggaacccaattacgacaagtttcggcacatattaatgcagggtgtatattattaagtgtggtgtttggtcgataaaaattaaaaaataacttaatttattattgatctcgtgtgtacaaccgaaatcatggcgatgttttacgcacacgctctcggtgggtacgacgagaatcttcatgcctttcctggaatatcatcgactgttgccaatgatgtcaggaaatattctgttgtgtcagtttataataacaagtatgacattgtaaaagacaaatatatgtggtgttacagtcaggtgaacaagagatatattggagcactgctgcctatgtttgagtgcaatgaatatctacaaattggaaatccgatccatgatcaagaaggaaatcaaatctctatcatcacatatcgccacaaaaactactatgctctaagcggaatcgggtacgagagtctagacttgtgtttggaaggagtagggattcatcatcacgtacttgaaacaggaaacgctgtatatggaaaagttcaacatgattattctactatcaaagagaaggccaaagaaatgagtgcacttagtccaggacctatcatcgattaccacgtctggataggagattgtatctgtcaagttactgctgtggacgtacatggaaaggaaattatgaaaatgagattcaaaaagggtgcggtgcttccgatcccaaatctggtaaaagttaaacttggggagaatgatacagaaaatctttcttctactatatcggcggcaccatcgaggtaaccacctctctggaagacagcgtgaatcatgtactcatgaaacgtttggaaactatacgccatatgtggtctgttgtatatgatcattttgatattgtgaatggtaaagaatgctgttatgtgcatacgcattcatctaatcaaaatcctataccgagtactgtaaaaacaaatttgtacatgaagactatgggatcatgcattcaaatggattccatggaagctctagagtatcttagcgaactgaaggaatcaggtggatggagtcccagaccagaaatgcaggaatttgaatatccagatggagtggaagacactgaatcaattgagagattggcagaggagttcttcaatagatcagaacttcaggctggtgaatcagtcaaatttggtaattctattaattgttaaacatacatctgtttcagctaagcaactaagaacacgtatacggcagcagcttccttctatactctcatcttttaccaacacaaagggtggatatttgttcattggagttgataataatacacacaaagtatttggattcacggtgggttacgactacctcagactgatagagaatgatatagaaaagcatatcaaaagacttcgtgttgtgcatttctgtgagaagaaagaggacatcaagtacgcgtgtcgattcatcaaggtatataaacctggggatgagactacctcgacatacgtgtgcgctatcaaagtggaaagatgctgttgtgctgtgtttgcagattggccagaatcatggtatatggatactaatggtatcaagaagtattctccagatgaatgggtgtcacatataaaattttaattaatgtaactatagagaacaaataataaggttgtaatatcatatagacaataactaacaattaattagtaactgttatctcttttttaactaaccaactaactatatacctattaatacatcgtaattatagttcttaacatctattaatcattaattcgcttctttaattttttataaactaacattgttaattgaaaagggataacatgttacagaatataaattatatatggatttttttaaaaaggaaatacttgactggagtatatatttatctcttcattatatagcacgcgtgttttccaatttttccacatcccatataatacaggattataatctcgttcgaacatacgagaaagtggataaaacaatagttgattttttatctaggttgccaaatttattccatattttagaatatggggaaaatattctacatatttattctatggatgatgctaatacgaatattataattttttttctagatagagtattaaatattaataagaacgggtcatttatacacaatctcgggttatcatcatccattaatataaaagaatatgtatatcaattagttaataatgatcatccagataataggataagactaatgcttgaaaatggacgtagaacaagacattttttgtcctatatatcagatacagttaatatctatatatgtattttaataaatcatggattttatatagatgccgaagacagttacggttgtacattattacatagatgtatatatcactataagaaatcagaatcagaatcatacaatgaattaattaagatattgttaaataatggatcagatgtagataaaaaagatacgtacggaaacacaccttttatcctattatgtaaacacgatatcaacaacgtggaattgtttgagatatgtttagagaatgctaatatagactctgtagactttaatagatatacacctcttcattatgtctcatgtcgtaataaatatgattttgtaaagttattaatttctaaaggagcaaatgttaatgcgcgtaataaattcggaactactccattttattgtggaattatacacggtatctcgcttataaaactatatttggaatcagacacagagttagaaatagataatgaacatatagttcgtcatttaataatttttgatgctgttgaatctttagattatctattatccagaggagttattgatattaactatcgtactatatacaacgaaacatctatttacgacgctgtcagttataatgcgtataatacgttggtctatctattaaacaaaaatggtgattttgagacgattactactagtggatgtacatgtatttcggaagcagtcgcaaacaacaacaaaataataatggaagtactattgtctaaacgaccatctttgaaaattatgatacagtctatgatagcaattactaaacataaacagcataatgcagatttattgaaaatgtgtataaaatatactgcgtgtatgaccgattatgatactcttatagatgtacagtcgctacagcaatataaatggtatattttaagatgtttcgatgaaatagatatcatgaagagatgttatataaaaaataaaactgtattccaattagttttttgtatcaaagacattaatactttaatgagatacggtaaacatccttctttcgtgaaatgcactagtctcgacgtatacggaagtcgtgtacgtaatatcatagcatctattagatatcgtcagagattaattagtctattatccaagaagctggatcctggagataaatggtcgtgttttcctaacgaaataaaatataaaatattggaaaactttaacgataacgaactatccacatatctaaaaatcttataaacattattaaaatataaaatctaagtaggataaaatcacactacatcattgtttccttttagtgctcgacagtgtatactatttttaacgctcataaataaaaatgaaaacgatttccgttgttacgttgttatgcgtactacctgctgttgtttattcaacatgtactgtacccactatgaataacgctaaattaacgtctaccgaaacatcgtttaatgataaccagaaagttacgtttacatgtgatcagggatatcattctttggatccaaatgctgtctgtgaaacagataaatggaaatacgaaaatccatgcaaaaaaatgtgcacagtttctgattatgtctctgaactatataataaaccgctatacgaagtgaattccaccatgacactaagttgcaacggcgaaacaaaatattttcgttgcgaagaaaaaaatggaaatacttcttggaatgatactgttacgtgtcctaatgcggaatgtcaacctcttcaattagaacacggatcgtgtcaaccagttaaagaaaaatactcatttggggaatatatgactatcaactgtgatgttggatatgaggttattggtgcttcgtacataagttgtacagctaattcttggaatgttattccatcatgtcaacaaaaatgtgatatgccgtctctatctaacggattaatttccggatctacattttctatcggtggcgttatacatcttagttgtaaaagtggttttacactaacggggtctccatcatccacatgtatcgacggtaaatggaatcccatactcccaatatgtgtacgaactaacgaaaaatttgatccagtggatgatggtcccgacgatgagacagatttgagcaaactctcgaaagacgttgtacaatatgaacaagaaatagaatcgttagaagcaacttatcatataatcatagtggcgttgacaattatgggcgtcatatttttaatctccgttatagtattagtttgttcctgtgacaaaaataatgaccaatataagttccataaattgctaccgtaaatataaatccgttaaaataattaataatttaataacaaacaagtatcaaaagattaaagacttatagctagaatcaattgagatgtcttcttcagtggatgttgatatctacgatgccgttagagcatttttactcaggcactattataacaagagatttattgtgtatggaagaagtaacgccatattacataatatatacaggctatttacaagatgcgccgttataccgttcgatgatatagtacgtactatgccaaatgaatcacgtgttaaacaatgggtgatggatacacttaatggtataatgatgaatgaacgcgatgtttctgtaagcgttggcaccggaatactattcatggaaatgtttttcgattacaataaaaatagtatcaacaatcaactaatgtatgatataattaatagcgtatctataattctagctaatgagagatatagaagcgcttttaacgacgatggtatatacatccgtagaaatatgattaacaagttgtacggatacgcatctctaactactattggcacgatcgctggaggtgtttgttattatctgttgatgcatctagttagtttgtataaataattatttcaatatactagttaaaattttaagattttaaatgtataaaaaactaataacgtttttatttgtaataggtgcattagcatcctattcgaataatgagtacactccgtttaataaactgagtgtaaaactctatatagatggagtagataatatagaaaattcatatactgatgataataatgaattggtgttaaattttaaagagtacacaatttctattattacagagtcatgcgacgtcggatttgattccatagatatagatgttataaacgactataaaattattgatatgtataccattgactcgtctactattcaacgcagaggtcacacgtgtagaatatctaccaaattatcatgccattatgataagtacccttatattcacaaatatgatggtgatgagcgacaatattctattactgcagagggaaaatgctataaaggaataaaatatgaaataagtatgatcaacgatgatactctattgagaaaacatactcttaaaattggatctacttatatatttgatcgtcatggacatagtaatacatattattcaaaatatgatttttaaaaatttaaaatatattatcacttcagtgacagtagtcaaataacaaacaacaccatgagatatattataattctcgcagttttgttcattaatagtatacatgctaaaataactagttataagtttgaatccgtcaattttgattccaaaattgaatggactggggatggtctatacaatatatcccttaaaaattatggcatcaagacgtggcaaacaatgtatacaaatgtaccagaaggaacatacgacatatccgcatttccaaagaatgatttcgtatctttctgggttaaatttgaacaaggcgattataaagtggaagagtattgtacgggactatgcgtcgaagtaaaaattggaccaccgactgtaacattgactgaatacgacgaccatatcaatttgtacatcgagcatccgtatgctactagaggtagcaaaaagattcctatttacaaacgcggtgacatgtgtgatatctacttgttgtatacggctaacttcacattcggagattctaaagaaccagtaccatatgatatcgatgactacgattgcacgtctacaggttgcagcatagactttgtcacaacagaaaaagtgtgcgtgacagcacagggagccacagaagggtttctcgaaaaaattactccatggagttcgaaagtatgtctgacacctaaaaagagtgtatatacatgcgcaattagatccaaagaagatgttcccaatttcaaggacaaaatggccagagttatcaagagaaaatttaatacacagtctcaatcttatttaactaaatttctcggtagcacatcaaatgatgttaccacttttcttagcatgcttaacttgactaaatattcataactaatttttattaatgatacaaaaacgaaataaaactgcatattatacactggttaacgcccttataggctctaaccattttcaagatgaggtccctgattatagtccttctgttcccctctatcatctactccatgtctattagacgatgtgagaagactgaagaggaaacatggggattgaaaatagggttgtgtataattgccaaagatttctatcccgaaagaactgattgcagtgttcatctcccaactgcaagtgaaggattgataactgaaggcaatggattcagggatatacgaaacaccgataaattataaaaaaagcaatgtgtccgctgtttccgttaataatactattttcgtaactggcggattattcataaataactctaatagcacgatcgtggttaacaatatggaaaaacttgacatttataaagacaaacaatggtcgattatagaaatgcctatggctagggtatatcacggcattgactcgacatttggaatgttatattttgccggaggtctatccgttaccgaacaatatggtaatttagagaaaaacaacgagatatcttgttacaatcctagaacgaataagtggtttgatatttcatatactatttataagatatccatatcatcattgtgtaaactaaataacgtcttctatgtatttagtaaggacattggatatgtggaaaagtatgatggtgcatggaagttagtacatgatcgtctccccgctataaaggcattatcaacttctccttattgattgaaaatgaaaatataaatagtttttatgtatagcagtattaccctatagttttattgcttactactaacatggatacagatgttacaaatgtagaagatatcataaatgaaatagatagagagaaagaagaaatactaaaaaatgtagaaattgaaaataataaaaacattaacaagaatcatcccaatgaatatattagagaagcactcgttattaataccagtagtaatagtgattccattgataaagaagttatagaatgtatcagtcacgatgtaggaatatagatcatatctactaatttttataatcgatacaaaacataaaaaacaactcgttattacatagcaggcatggaatccttcaagtattgttttgataacgatggcaagaaatggattatcggaaatactttatattctggtaattcaatactctataaggtcagaaaaaatttcactagttcgttctacaattacgtaatgaagatagatcacaaatcacacaagccattgttgtctgaaatacgattctatatatctgtattggatcctttgactatcgacaactggacacgggaacgtggtataaagtatttggctattccagatctgtatggaattggagaaaccgatgattatatgttcttcgttataaagaattcgggaagagtattcgccccaaaggatactgaatcagtcttcgaagcatgcgtcactatgataaacacgttagagtttatacactctcgaggatttacccatggaaaaatagaaccgaggaatatactgattagaaataaacgtctttcactaattgactattctagaactaacaaactatacaagagtggaaactcacatatagattacaacgaggacatgataacttcaggaaatatcaattatatgtgtgtagacaatcatcttggagcaacagtttcaagacgaggagatttagaaatgttgggatattgcatgatagaatggttcggtggcaaacttccatggaaaaacgaaagtagtataaaagtaataaaacaaaaaaaagaatataaaaaatttatagctactttctttgaggactgttttcctgaaggaaatgaacctctggaattagttagatatatagaattagtatacacgttagattattctcaaactcctaattatgacagactacgtaaactgtttatacaagattgaaattatattcttttttttatagagtgtggtagtgttacggatatctaatattaatattagactatctctatcgcgctacacgaccaatatcgattactatggatatcttctatgaaaggagagaatgtatttatttctccagcgtcaatctcgtcagtattgacaatactgtattatggagctaatggatccactgctgaacagctatcaaaatatgtagaaacggaggagaacacggataaggttagcgctcagaatatctcattcaaatccatgaataaagtatatgggcgatattctgccgtgtttaaagattcctttttgagaaaaattggcgataagtttcaaactgttgacttcactgattgtcgcactatagatgcaatcaacaagtgtgtagatatctttactgaggggaaaatcaatccactattggatgaaccattgtctcctagcaattagtgccgtatactttaaagcaaaatggttgacgccattcgaaaaggaatttaccagtgattatcccttttacgtatctccgacggaaatggtagacgtaagtatgatgtctatgtacggcaaggcatttaatcacgcatctgtaaaagaatcattcggcaacttttcaatcatagaactgccatatgttggagatactagtatgatggtcattcttccagacaagattgatggattagaatccatagaacaaaatctaacagatacaaattttaagaaatggtgtgactttatggatgctatgtttatagatgttcacattcccaagtttaaggtaacaggctcgtataatctggtggatactctagtaaagtcaggactgacagaggtgttcggttcaactggagattatagcaatatgtgtaatttagatgtgagtgtcgacgctatgatccacaaaacgtatatagatgtcaatgaagagtatacagaagcagctgcagcaacttctgtactagtggcagactgtgcatcaacaattacaaatgagttctgtgcagatcatccgttcatctatgtgattaggcatgttgatggaaaaattcttttcgttggtagatattgctctccgacaactaattgttaaccattttttttaaaaaaaatagaaaaaacatgtggtattagtgcaggtcgttgttcttccaattgcaattggtaagatgacggccaactttagtacccacgtcttttcaccacagcactgtggatgtgacagactgaccagtattgatgacgtcaaacaatgtttgactgaatatatttattggtcgtcctatgcataccgcaacaggcaatgcgctggacaattgtattccacactcctctcttttagagatgatgcggaattagtgttcatcgacattcgcgagctggtaaaaaatatgccgtgggatgatgtcaaagattgtacagaaatcatccgttgttatataccggatgagcaaaaaaccatcagagagatttcggccatcatcggactttgtgcatatgctgctacttactggggaggtgaagaccatcccactagtaacagtctgaacgcattgtttgtgatgcttgagatgctaaattacgtggattataacatcatattccggcgtatgaattgatgagttgtacatcttgacattttctttcttctcttctccctttcttctcttctcccttcctccctcttctccctttcccagaaacaaacttttttacccactataaaataaaatgagtatactacctattatatttcttcctatatttttttattcttcattcgttcagacttttaacgcgtctgaatgtatcgacaaagggcaatattttgcatcattcatggagttagaaaacgagccagtaatcttaccatgtcctcaaataaatacgctatcatccggatataatatattagatattttatgggaaaaacgaggagcggataatgatagaattataccgatagataatggtagcaatatgctaattctgaacccgacacaatcagactctggtatttatatatgcattaccacgaacgaaacctactgtgacatgatgtcgttaaatttgacaatcgtgtctgtctcagaatcaaatatagatcttatctcgtatccacaaatagtaaatgagagatctactggcgaaatggtatgtcccaatattaatgcatttattgctagtaacgtaaacgcagatattatatggagcggacatcgacgccttagaaataagagacttaaacaacggacacctggaattattaccatagaagatgttagaaaaaatgatgctggttattatacatgtgttttagaatatatatacggtggcaaaacatataacgtaaccagaattgtaaaattagaggtacgggatagaataataccttctactatgcaattaccagatggcattgtaacttcaataggtagtaatttgactattgcatgcagagtatcgttgagacctcccacaacggacaccgacgtcttttggataagtaatggtatgtattacgaagaagatgatggggacggaaacggtagaataagtgtagcaaataaaatctatatgaccgataagagacgtgttattacatcccggttaaacattaatcctgtcaaggaagaagatgctacaacgtttacgtgtatggcgtttactattcctagcatcagcaaaacagttactgttagtataacgtgaatgtatgttgttacatttccatgtcaattgagtttataagaatttttatacattatcttccaacaaacaattgacgaacgtattgctatgattaactcccacgatactatgcatattattaatcattaacttgcagactatacctagtgctattttgacatactcgtgttcttgtgtaattgcggtatctatattattaaagtacgtaaatctagctatagttttattatttaattttagataatataccgtctccttatttttaaaaattgccacatcctttattaaatcatgaatgggaatttctatgtcatcgttagtatattgtgaacaacaagagcagatatctataggaaagggtggaatgcgatacattgatctatgtagttttaaaacacacgcgaactttgaagaatttatataaatcattccatcgatacatccttctatgttgacatgtatatatccaggaattcttttattaatgtcaggaaatgtataaactaaaacattgcccgaaagcggtgcctctatctgcgttatatccgttcttaacttacaaaatgtaaccaatacctttgcatgacttgttttgttcggcaacgttagtttaaacttgacgaatggattaattacaatagcatgatccgcgcatctattaagtttttttactttaacgcccttgtatgtttttacagagactttatctaaatttctagtgcttgtatgtgttataaatataacgggatatagaaccgaatcacctaccttagatacccaattacattttatcagatccagataataaacaaattttgtcgccctaactaattctatattgttatatattttacaattggttatgatatcatgtaataacttggagtctaacgcgcatcgtcgtacgtttatacaattgtgatttagtgtagtatatctacacatgtatttttccgcactatagtattctggactagtgataaaactatcgttatatctgtcttcaatgaactcatcgagatattgctctctgtcatattcatacacctgcataaactttctagacatcttacaatccgtgttattttaggatcatatttacatatttacgggtatatcaaagatgttagattagttaatgggaatcgtctataataatgaatattaaacaattatatgaggacttttaccacaaagcatcataaaaatgagtcgtcgtctgatttatgttttaaatatcaaccgcaaatcaactcataaaatacaagagaatgaaatatatacatattttagtcattgcaatatagaccatacttctacagaacttgattttgtagttaaaaactatgatctaaacagacgacaacctgtaactgggtatactgcactacactgctatttgtataataattactttacaaacgatgtactgaagatattattaaatcatgacgtaaatgtaacgatgaaaaccagtagcggacgtatgcctgtttatatattgcttactagatgttgtaatatttcacatgatgtagtgatagatatgatagacaaagataaaaaccacttattacatagagactattccaacctattactagagtatataaaatctcgttacatgttattgaaggaagaggatatcgatgagaacatagtatccactttattagataagggaatcgatcctaactttaaacaagacggatatacagcgttacattattattatttgtgtctcgcacacgtttataaactaggtgagtgtagaaaaccgataacgataaaaaaggccaagcgaattatttctttgtttatacaacatggagctaatctaaacgcgttagataattgtggtaatacaccattccatttgtatcttagtattgaaatgtgtaataatattcatatgactaaaatgctgttgacttttaatccgaatttcaaaatatgtaataatcatggattaacgcctatactatgttatataacttccgactacatacaacacgatattcttgttatgttaatacatcactatgaaacaaatgttggagaaatgccgatagatgagcgtcgtatgatcgtattcgagtttatcaaaacatattctacacgtccggcagattcgataacttatttgatgaataggtttaaaaatataaatatttatacccgctatgaaggaaagacattattacacgtagcatgtgaatataataatacacaagtaatagattatcttatacgtatcaacggagatataaatgcgttaaccgacaataacaaacacgctacacaactcattatagataacaaagaaaattccccatataccattaattgtttactgtatatacttagatatattgtagataagaatgtgataagatcgttggtggatcaacttccatctctacctatcttcgatataaaatcatttgagaaattcatatcctactgtatacttttagatgacacattttacgataggcacgttaagaatcgcgattctaaaacgtatcgatacgcattttcaaaatacatgtcgtttgataaatacgatggtataataactaaatgtcacgacgaaacaatgttactcaaactgtccactgttctagacactacactatatgcagttttaagatgtcataattcgagaaagttaagaagatacctcaacgagttaaaaaaatataataacgataagtcctttaaaatatattctaatattatgaatgagagataccttaatgtatattataaagatatgtacgtgtcaaaggtatatgataaactatttcctgttttcacagataaaaattgtctactaacattactaccttcagaaattatatacgaaatattatacatgctgacaattaacgatctttataatatatcgtatccacctaccaaagtatagttgtatttttctcatgcgatgtgtgtaaaaaaactgatattatataaatattttagtgccgtataataaagatgacgatgaaaatgatggtacatatatatttcgtatcattattgttattgctattccacagttacgccatagacatcgaaaatgaaatcacagaattcttcaataaaatgagagatactctaccagctaaagactctaaatggttgaatccagcatgtatgttcggaggcacaatgaatgatatagccgctctaggagagccattcagcgcaaagtgtcctcctattgaagacagtcttttatcgcacagatataaagactatgtggttaaatgggagaggctagaaaagaatagacggcgacaggtttctaataaacgtgttaaacatggtgatttatggatagccaactatacatctaaattcagtaaccgtaggtatttgtgcaccgtaactacaaagaatggtgactgtgttcagggtatagttagatctcatattaaaaaacctccttcatgcattccaaaaacatatgaactaggtactcatgataagtatggcatagacttatactgtggaattctttacgcaaaacattataataatataacttggtataaagataataaggaaattaatatcgacgacattaagtattcacaaacgggaaaggaattaattattcataatccagagttagaagatagcggaagatacgactgttacgttcattacgacgacgttagaatcaagaatgatatcgtagtatcaagatgtaaaatacttacggttataccgtcacaagaccacaggtttaaactaatactagatccgaaaatcaacgtaacgataggagaacctgccaatataacatgcactgctgtgtcaacgtcattattgatcgacgatgtactgattgaatgggaaaatccatccggatggcttataggattcgattttgatgtatactctgttttaactagtagaggcggtatcaccgaggcgaccttgtactttgaaaatgttactgaagaatatataggtaatacatataaatgtcgtggacacaactattattttgaaaaaacccttacaactacagtagtattggagtaaatatacaatgcatttttatatacattactgaattattattactgaattattattactgaattattattaattatatcgtatttgtgctatagaatggatgaagatacgcgactatctaggtatttgtatctcaccgatagagaacatataaatgtagactctattaaacagttgtgtaaaatatcagatcctaatgcatgttatagatgtggatgtacggctttacatgagtacttttataattatagatcagtcaacggaaaatacaagtatagatacaacggttactatcaatattattcatctagcgattatgaaaattataatgaatattattatgatagaactggtatgaacagtgagagtgataatatatcaatcaaaacagaatatgaattctatgatgaaacacaagatcaaagtacacaactagtaggttacgacattaaactcaaaaccaatgaggatgattttatggctatgatagatcagtgggtgtccatgattatatagatgaatcaattaataaagtagtatatggaagagagtctcacgtaagatggcgggatatatggcaagaacataatgatggcgtatacagtataggaaaggagtgcatagataatatatacgaagacaaccataccgtagacgaattctacaagatagacagcgtatcagatgtagatgacgcggaacacatatctccgataactaaaaaaccatagaatcagttgatgataatacctacatttctaatcttccgtataccatcaaatacaaaatattcgagcaacaataagtattttttatacctttaaaactgataaataaattttttctagtgatattttggcaagatgagaatcctatttctcatcgctttcatgtatgggtgtgttcactcatatgttaacgcggttgaaaccaaatgtccaaatctagacattgtaacatcttctggagaatttcattgttcaggatgtgtggaacatatgcctgagtttagctatatgtattggttggcaaaggatatgaaatcggacgaggataccaagtttatagaacatctgggtgatggcatcaaagaagatgaaaccgttcgtaccacagatagtggaatcgtcactctacgtaaagtccttcatgtgactgatactaataaatttgataattataggttcacttgtgtcctcgctacgctagatggcatttataaaaagaatgtttgctgaagtagttgtgtgctactatttttatttatgatataatctaatggaattaatttgaattgatatttatccaatactaaagattatattagaatcaaattaatcttttatacgagaaaaaataacgacatacgtcgtcaacaaattaaactttttatttattagttaactagcttatagaacttgctcattgttatgtttctaaaacgggtacggcatataggacaattatccgacgcaccggtttctcttcgtgttctatgccatatattgatgcatgttatgcaaaatatatgagtacacgaatccaataaaccaaagtatctatcgttttgagtaaacaacttcatagcaaattccacattctttttctttacttactctatacacgtcctcgtatttatttagtattttgatgatatccaactcagaaatggttgttgtattattgggtgtatttggagtataggtattattagctatgtaccaatttaccaaccctcttaatattgattgataatcacatcggttatccaattaataactaaattgtagtgtatatatagaccatatatgtttctatttttttgacagttacgtatagtttcagtaagttttgattgttgtattcctgtatctctagataagttagtcatatagtcccttccggcgatacgttttttccaagcccgaaattgattagccaaatgtgtatttatttttgtgatattgatataatatttcggataatgcatactgttagtcttatatcatttggttcatctatgtattgtaatattgttacatgatctatagatgatgtattgattttggcaggatcgaattccatatccgcgactaaacagtgaaaaaaatgtaaatactttttaaattttaaattagtaaaacttttttttattttttatgattccaaaaatactgaatacaaagtcctaaattataaatatggagatcatactaccacaacttattattatgtatacaaggccggtgtaatagatagatatatataattctattacaccggcagacaattaccgaccggtatttgtcgttaccaacataccgtataatatgtaatatacaattccataacccattgacagttgttatacatcaaaattgcaattcttttgattacgatgttataagaatgtagttaattgatgtatgatgttaatgtgtcctctttcctcttataacatcgtaatcaaaaacttttttataatatatacctaataatgtgtcttaatagttctcgtgattcgtcaaacaatcattcttataaaatataataaagcaacgtaaaaacacataaaaataagcgtaactaataagacaatggatatttacgacgataaaggtctacagactattaaactgtttaataatgaatttgattgtataaggaatgacatcagagaattatttaaacatgtaactgattccgatagtatacaacttccgatggaagacaattctgatattatagaaaatatcagaaaaatactatatagacgattaaaaaatgtagaatgtgttgacatcgataacacaataacttttatgaaatacgatccaaatgatgataataagcgtacgtgttctaattgggtacccttaactaataactatatggaatattgtctagtaatatatttggaaacaccgatatgtggaggcaaaataaaattataccaccctacaggaaatataaagtcggataaggatattatgtttgcaaagactctagactttaaatcaacgaaagtgttaactggacgtaaaacaattgccgttctagacatatccgtttcatataatagatcaatgactactattcactacaacgacgacgttgatatagatatacatactgataaaaatggaaaagagttatgttattgttatataacaatagatgatcattacttggttgatgtggaaactataggagttatagtcaatagatctggaaaatgtctgttagtaaataaccatctaggtataggtatcgttaaagataaacgtataagcgatagttttggagatgtatgtatggatacaatatttgacttttctgaagcacgagagttattttcattaactaatgatgataacaggaatatagcatgggacactgataaactagacgatgatacagatatatggactcccgtcacagaagatgattacaaatttctttctagactagtattgtatgcaaaatctcaatcggatactgtatttgactattatgttcttactggtgatacggaaccacccactgtattcattttcaaggtaactagattttactttaatatgccgaaataaaaaatttttgtataatatctagaggtagaggtattgtttagataaatacaaataacatagatacatcgcatacttagcatttttataaatatacataagacatacactttatacatttttgtaaaaatactcataaaaaaatttataaaaattatggcacaaccatatcttgtataggtagtttagttcgtcgagtgaacctataaacagataatagacaacacataataatgcctactaatacaagcataataccgggagatgggatatatgacgttgtagtgtttgggttttctgaacgttgatagtctactaatactacatgctgacatctaatgcctgtataaccatgagagcatctacaatacataccgtcaatatctctagcgtggatacagtcaccgtgtaaacaatatccatctccctctggaccgcataatctgatagctggaatatctgttgtagcgtttgtaatttctggcaatgtcgtttcgatagcgttaccactatcggcgaatgatctgattatcatagcagcgaacaacaacatcagataatttatcaacatttttgatggattctgtgtttatgctgtttctcagtgtgtgtttatgacaagattgggaattttatattattaattcagtaatataaactaataatatattgttaattgtgtaaataatataaaaataacaatacaatattgaatgtgttgctgttaaaaatgtatgtgttaatataatagaataaaataaatgagtatgatcattttagataacgattgattttatcattaccgcttcattcttatattctttgcttacggaacctatatttagaaacatctactaacaattttttatgcttgcattattaatggtatgtaatatgattgattgtgtacgcaataccaatttgttaagtatgaatacggggtacaaacataaattgaaatttaacattatttatttatgatatatatcgttatcgttaggtctataccatggatatctttaaagaactaatcttaaaacaccctgatgaaaatgttttgatttctccagtttccattttatctactttatctattctaaatcatggagcagctggttctacagctgaacaactatcaaaatatatagagaatatgaatgagaatacacccgatgacaataatgatgacatggaggtagatattccgtattgtgcgacactagctaccgcaaataaaatatacggtagcgatagtatcgagttccacgcctccttcctacaaaaaataaaagacgattttcaaactgtaaactttaataatgctaaccaaacaaaggaactaatcaacgaatgggttaagacaatgacaaatggtaaaattaattccttattgactagtccgctatccattaatactcgtatgacagttgttagcgccgtccattttaaagcaatgtggaaatatccattttctaaacatcttacatatacagacaagttttatatttctaagaatatagttaccagcgttgatatgatggtgggtaccgagaataacttgcaatatgtacatattaatgaattattcggaggattctctattatcgatattccatacgagggaaactctagtatggtaattatactaccggacgacatagaaggtatatataacatagaaaaaaatataacagatgaaaaatttaaaaaatggtgtggtatgttatctactaaaagtatagacttgtatatgccaaagtttaaagtggaaatgacagaaccgtataatctggtaccgattttagaaaatttaggacttactaatatattcggatattatgcagattttagcaagatgtgtaatgaaactatcactgtagaaaaatttctacatacgacgtttatagatgttaatgaggagtatacagaagcatcggccgttacaggagtatttacgattaacttttcgatggtatatcgtacgaaggtctacataaaccatccattcatgtacatgattaaagacaccacaggacgtatactttttatagggaaatactgctatccgcaataaatataaacaaatagacttttataaagagtcttcaacgataagtatatcgacatactacttatgctgcgaaagattctgaacgagaacgactatctcaccctcttggatcatatccgcactgctaaatactaaatctccactacactttttatcatcttatgaggaatgattgccttcgtgaaataggaataattagcaccagaatagctatggattattgtggtagagagtgcactattctatgtcgtctactggatgaagatgtgacgtacaaaaaaataaaactagaaattgaaacgtgtcacaacttatcaaaacatatagatagacgaggaaacaatgcgctacattgttacgtctccaataaatgcgatacagacattaagattgttctctcgcggagtcgagagactttgtagaaacaacgaaggattaactccgctaggagtatacagtaagcatagatacgtaaaatctcagattgtgcatctactgatatccagctattcaaattcctctaacgaactcaagtcgaatataaatgatttcgatctgtattcggataatatcgacttacgtctgctaaaatacctaattgtggataaacggatacgtccgtccaagaatacgaattatgcaatcaatggtctcggattggtggatatatacgtaacgacgcctaatccgagaccagaagtattgctatggcttcttaaatcagaatgttacagcaccggttacgtatttcgtacctgtatgtacgacagtgatatgtgtaagaactctcttcattactatatatcgtctcatagagaatctcaatctctatccaaggatgtaattaaatgtttgatcgataacaatgtttccatccatggcagagacgaaggaggatctttacccatccaatactactggtctttctcaaccatagatatagagattgttaaattattattaataaaggatgtggacacgtgtagagtatacgacgtcagccctatattagaggcgtattatctaaacaagcgatttagagtaaccccatataatgtagacatggaaatcgttaatcttcttattgagagacgtcatactcttgtcgacgtaatgcgtagtattacttcgtacgattccagagaatataaccactacatcatcgataacattctaaagagatttagacaacaggatgaatccatcgtacaagccatactgataaactacttacattacggcgatatggtcgttcgatgcatgttagataacggacaacaactatcctctacacgactactttgttaataataatctcgtcgatgtaaacgtcgtaaggtttatcgtggaaaatatggacacgcggctgtaaatcacgtatcgaacaatggccgtctatgtatgtacggtctgatattatcgagatttaataattgcgggtatcactgttatgaaaccatactgatagatgtatttgatatactaagcaagtacatggatgatatagatatgatcgataactctactatattacgcggtcgatgtcaataatatacaatttgcaaagcggttattggaatatggagcgagtatcacgctcgataatcaatacggccatccagaaaagcagttacagaagagaaaacaaaacgaaatcgttgttctacaagatgtctctccctacgacgattactacgtaaaaaagatactagcctactgcctattaagggacgagtcattcgcggaactacatagtaaattctgtttaaacgaggactataaaagtgtatttatgaaaaatatatcattcgataagatagattccatcatcgtgacataagtcgcctcaaagagattcgaatctccgacaccgacctgtatacggtatcacagctatcttaaagccatacattcagacagtcacatttcatttcccatgtacgacgatctcatagaacagtgccatctatcgatggagcgtaaaagtaaactcgtcgacaaagcactcaataaattagagtctaccatcggtcaatctagactatcgtatttgcctccggaaattatgcgcaatatcatctaaacagtatgttgtacggaaagaaccattacaaatattatccatgatagaaagaaaatatctatatgattggagaagtaggaaacaggaacaagacaacgattactacattattaaatcatgaagtccgtattatactcgtatatattgtttctctcatgtataataataaacggaagagatatagcaccgcatgcaccatccgatggaaagtgtaaagacaacgaatacaaacgccataatttgtgtccgggaacatacgcttccagattatgcgatagcaagactaacacacgatgtacgccgtgtggttcgggtaccttcacatctcgcaataatcatttacccgcttgtctaagttgtaacggaagacgcgatcgtgtaacacgactcacaatagaatctgtgaatgctctcccggatattattgtcttctcaaaggatcatccggatgcaaggcatgtgtttcccaaacaaaatgtggaataggatacggagtatccggagacgtcatctgttctccgtgtggtctcggaacatattctcacaccgtctcttccgcagataaatgcgaacccgtacccagaaatacgtttaactatatcgatgtggaaattaacctgtatccagttaacgacacgtcgtgtactcggacgaccactaccggtctcagcgaatccatctcaacgtcggaactaactattactatgaatcataaagactgtaatcccgtatttcgtgatggatacttctccgttcttaataaggtagcgacttcaggtttctttacaggagaaaggtgtgcactctgaatttcgagattaaatgcaataacaaagattcttcctccaaacagttaacgaaagcaaagaatgatactatcatgccgcattcggagacagtaactctagtgggcgacatctatatactatatagtaataccaatactcaagactacgaaactgatacaatctcttatcatgtgggtaatgttctcgatgtcgatagccatatgcccggtagttgcgatatacataaactgatcactaattccaaacccacccactttttatagtaagtttttcacccataaataataaatacaataattaatttctcgtaaaagtagaaaatatattctaatttattgcacggtaaggaagtagaatcataaagaacagtactcaatcaatagcaattatgaaacaatatatcgtcctggcatgcatgtgcctggcggcagctgctatgcctgccagtcttcagcaatcatcctcatcctcctcctcgtgtacggaagaagaaaacaaacatcatatgggaatcgatgttattatcaaagtcacaaagcaagaccaaacaccgaccaatgataagatttgccaatccgtaacggaaattacagagtccgagtcagatccagatcccgaggtggaatcagaagatgattccacatcagtcgaggatgtagatcctcctaccacttattactccatcatcggtggaggtctgagaatgaactttggattcaccaaatgtcctcagattaaatccatctcagaatccgctgatggaaacacagtgaatgctagattgtccagcgtgtccccaggacaaggtaaggactctcccgcgatcactcatgaagaagctcttgctatgatcaaagactgtgaagtgtctatcgacatcagatgtagcgaagaagagaaagacagcgacatcaagacccatccagtactcgggtctaacatctctcataagaaagtgagttacgaagatatcatcggttcaacgatcgtcgatacaaaatgcgtcaagaatctagagtttagcgttcgtatcggagacatgtgcaaggaatcatctgaacttgaggtcaaggatggattcaagtatgtcgacggatcggcatctgaaggtgcaaccgatgatacttcactcatcgattcaacaaaactcaaagcgtgtgtctgaatcgataactctattcatctgaaattggatgagtagggttaatcgaacgattcaggcacaccacgaattaaaaaagtgtaccggacactatattccggtttgcaaaacaaaaatgttcttaactacattcacaaaaagttacctctcgcgacttcttctttttctgtctcaatagtgtgatacgattatgacactattcctattcctattcctatttcctttcagagtatcacaaaaatattaaacctctttctgatggtctcataaaaaaagttttacaaaaatatttttattctctttctctctttgatggtctcataaaaaaagttttacaaaaatatttttattctctttctctctttgatggtctcataaaaaaagttttacaaaaatatttttattctctttctctctttgatggtctcataaaaaaagttttacaaaaatatttttattctctttctctctttgatggtctcataaaaaaagttttacaaaaatatttttattctctttctctctttgatggtctcataaaaaaagttttacaaaaatatttttattctctttctctctttgatggtctcataaaaaaagttttacaaaaatatttttattctctttctctctttgatggtctcataaaaaaagttttacaaaaatatttttattctctttctctctttgatggtctcataaaaaaagttttacaaaaatatttttattctctttctctctttgatggtctcataaaaaaagttttacaaaaatatttttattctctttctctctttgatggtctcataaaaaaagttttacaaaaatatttttattctctttctctctttgatggtctcataaaaaaagttttacaaaaatatttttattctctttctctctttgatggtctcataaaaaagttttacaaaaatatttttattctctttctctctttgatggtctcataaaaaagttttacaaaaatatttttattctctttctctctttgatggtctcataaaaaaagttttacaaaaatatttttattctctttctctctttgatggtctcataa

SEQ ID NO: 17 - DNA, 201444 bp, Artificial Sequence
  Vaccinia virus GLV-1h190 genome
ttatgagaccatcaaagagagaaagagaataaaaatatttttgtaaaactttttttatgagaccatcaaagagagaaagagaataaaaatatttttgtaaaacttttttatgagaccatcaaagagagaaagagaataaaaatatttttgtaaaacttttttatgagaccatcaaagagagaaagagaataaaaatatttttgtaaaactttttttatgagaccatcaaagagagaaagagaataaaaatatttttgtaaaactttttttatgagaccatcaaagagagaaagagaataaaaatatttttgtaaaactttttttatgagaccatcaaagagagaaagagaataaaaatatttttgtaaaactttttttatgagaccatcaaagagagaaagagaataaaaatatttttgtaaaactttttttatgagaccatcaaagagagaaagagaataaaaatatttttgtaaaactttttttatgagaccatcaaagagagaaagagaataaaaatatttttgtaaaactttttttatgagaccatcaaagagagaaagagaataaaaatatttttgtaaaactttttttatgagaccatcaaagagagaaagagaataaaaatatttttgtaaaactttttttatgagaccatcaaagagagaaagagaataaaaatatttttgtaaaactttttttatgagaccatcaaagagagaaagagaataaaaatatttttgtaaaactttttttatgagaccatcaaagagagaaagagaataaaaatatttttgtaaaactttttttatgagaccatcagaaagaggtttaatatttttgtgatactctgaaaggaaataggaataggaataggaatagtgtcataatcgtatcacactattgagacagaaaaagaagaagtcgcgagaggtaactttttgtgaatgtagttaagaacatttttgttttgcaaaccggaatatagtgtccggtacacttttttaattcgtggtgtgcctgaatcgttcgattaaccctactcatccaatttcagatgaatagagttatcgattcagacacacgctttgagttttgttgaatcgatgagtgaagtatcatcggttgcaccttcagatgccgatccgtcgacatacttgaatccatccttgacctcaagttcagatgattccttgcacatgtctccgatacgaacgctaaactctagattcttgacgcattttgtatcgacgatcgttgaaccgatgatatcttcgtaactcactttcttatgagagatgttagacccgagtactggatgggtcttgatgtcgctgtctttctcttcttcgctacatctgatgtcgatagacacttcacagtctttgatcatagcaagagcttcttcatgagtgatcgcgggagagtccttaccttgtcctggggacacgctggacaatctagcattcactgtgtttccatcagcggattctgagatggatttaatctgaggacatttggtgaatccaaagttcattctcagacctccaccgatgatggagtaataagtggtaggaggatctacatcctcgactgatgtggaatcatcttctgattccacctcgggatctggatctgactcggactctgtaatttccgttacggattggcaaatcttatcattggtcggtgtttggtcttgctttgtgactttgataataacatcgattcccatatgatgtttgttttcttcttccgtacacgaggaggaggatgaggatgattgctgaagactggcaggcatagcagctgccgccaggcacatgcatgccaggacgatatattgtttcataattgctattgattgagtactgttctttatgattctacttccttaccgtgcaataaattagaatatattttctacttttacgagaaattaattattgtatttattatttatgggtgaaaaacttactataaaaagtgggtgggtttggaattagtgatcagtttatgtatatcgcaactaccgggcatatggctatcgacatcgagaacattacccacatgataagagattgtatcagtttcgtagtcttgagtattggtattactatatagtatatagatgtcgcccactagagttactgtctccgaatgcggcatgatagtatcattctttgctttcgttaactgtttggaggaagaatctttgttattgcatttaatctcgaaattcagagtgcacacctttctcctgtaaagaaacctgaagtcgctaccttattaagaacggagaagtatccatcacgaaatacgggattacagtctttatgattcatagtaatagttagttccgacgttgagatggattcgctgagaccggtagtggtcgtccgagtacacgacgtgtcgttaactggatacaggttaatttccacatcgatatagttaaacgtatttctgggtacgggttcgcatttatctgcggaagagacggtgtgagaatatgttccgagaccacacggagaacagatgacgtctccggatactccgtatcctattccacattttgtttgggaaacacatgccttgcatccggatgatcctttgagaagacaataatatccgggagagcattcacagattctattgtgagtcgtgttacacgatcgcgtcttccgttacaacttagacaagcgggtaaatgattattgcgagatgtgaaggtacccgaaccacacggcgtacatcgtgtgttagtcttgctatcgcataatctggaagcgtatgttcccggacacaaattatggcgtttgtattcgttgtctttacactttccatcggatggtgcatgcggtgctatatctcttccgtttattattatacatgagagaaacaatatatacgagtataatacggacttcatgatttaataatgtagtaatcgttgtcttgttcctgtttcctacttctccaatcatatagatattttctttctatcatggataatatttgtaatggttctttccgtacaacatactgtttagatgatattgcgcataatttccggaggcaaatacgatagtctagattgaccgatggtagactctaatttattgagtgctttgtcgacgagtttacttttacgctccatcgatagatggcactgttctatgagatcgtcgtacatgggaaatgaaatgtgactgtctgaatgtatggctttaagatagctgtgataccgtatacaggtcggtgtcggagattcgaatctctttgaggcgacttatgtcacgatgatggaatctatcttatcgaatgatatatttttcataaatacacttttatagtcctcgtttaaacagaatttactatgtagttccgcgaatgactcgtcccttaataggcagtaggctagtatcttttttacgtagtaatcgtcgtagggagagacatcttgtagaacaacgatttcgttttgttttctcttctgtaactgcttttctggatggccgtattgattatcgagcgtgatactcgctccatattccaataaccgctttgcaaattgtatattattgacatcgaccgcgtaatatagtagagttatcgatcatatctatatcatccatgtacttgcttagtatatcaaatacatctatcagtatggtttcataacagtgatacccgcaattattaaatctcgataatatcagaccgtacatacatagacggccattgttcgatacgtgatttacagccgcgtgtccatattttccacgataaaccttacgacgtttacatcgacgagattattattaacaaagtagtcgtgtagaggatagttgttgtccgttatctaacatgcatcgaacgaccatatcgccgtaatgtaagtagtttatcagtatggcttgtacgatggattcatcctgttgtctaaatctctttagaatgttatcgatgatgtagtggttatattctctggaatcgtacgaagtaatactacgcattacgtcgacaagagtatgacgtctctcaataagaagattaacgatttccatgtctacattatatggggttactctaaatcgcttgtttagataatacgcctctaatatagggctgacgtcgtatactctacacgtgtccacatcctttattaataataatttaacaatctctatatctatggttgagaaagaccagtagtattggatgggtaaagatcctccttcgtctctgccatggatggaaacattgttatcgatcaaacatttaattacatccttggatagagattgagattctctatgagacgatatatagtaatgaagagagttcttacacatatcactgtcgtacatacaggtacgaaatacgtaaccggtgctgtaacattctgatttaagaagccatagcaatacttctggtctcggattaggcgtcgttacgtatatatccaccaatccgagaccattgattgcataattcgtattcttggacggacgtatccgtttatccacaattaggtattttagcagacgtaagtcgatattatccgaatacagatcgaaatcatttatattcgacttgagttcgttagaggaatttgaatagctggatatcagtagatgcacaatctgagattttacgtatctatgcttactgtatactcctagcggagttaatccttcgttgtttctacaaagtctctcgactccgcgagagaacaatcttaatgtctgtatcgcatttattggagacgtaacaatgtagcgcattgtttcctcgtctatctatatgttttgataagttgtgacacgtttcaatttctagttttatttttttgtacgtcacatcttcatccagtagacgacatagaatagtgcactctctaccacaataatccatagctattctggtgctaattattcctatttcacgaaggcaatcattcctcataagatgataaaaagtgtagtggagatttagtatttagcagtgcggatatgatccaagagggtgagatagtcgttctcgttcagaatctttcgcagcataagtagtatgtcgatatacttatcgttgaagactctttataaaagtctatttgtttatatttattgcggatagcagtatttccctataaaaagtatacgtcctgtggtgtctttaatcatgtacatgaatggatggtttatgtagaccttcgtacgatataccatcgaaaagttaatcgtaaatactcctgtaacggccgatgcttctgtatactcctcattaacatctataaacgtcgtatgtagaaatttttctacagtgatagtttcattacacatcttgctaaaatctgcataatatccgaatatattagtaagtcctaaattttctaaaatcggtaccagattatacggttctgtcatttccactttaaactttggcatatacaagtctatacttttagtagataacataccacaccattttttaaatttttcatctgttatatttttttctatgttatatataccttctatgtcgtccggtagtataattaccatactagagtttccctcgtatggaatatcgataatagagaatcctccgaataattcattaatatgtacatattgcaagttattctcggtacccaccatcatatcaacgctggtaactatattcttagaaatataaaacttgtctgtatatgtaagatgtttagaaaatggatatttccacattgctttaaaatggacggcgctaacaactgtcatacgagtattaatggatagcggactagtcaataaggaattaattttaccatttgtcattgtcttaacccattcgttgattagttcctttgtttggttagcattattaaagtttacagtttgaaaatcgtcttttattttttgtaggaaggaggcgtggaactcgatactatcgctaccgtatattttatttgcggtagctagtgtcgcacaatacggaatatctacctccatgtcatcattattgtcatcgggtgtattctcattcatattctctatatattttgatagttgttcagctgtagaaccagctgctccatgatttagaatagataaagtagataaaatggaaactggagaaatcaaaacattttcatcagggtgttttaagattagttctttaaagatatccatggtatagacctaacgataacgatatatatcataaataaataatgttaaatttcaatttatgtttgtaccccgtattcatacttaacaaattggtattgcgtacacaatcaatcatattacataccattaataatgcaagcataaaaaattgttagtagatgtttctaaatataggttccgtaagcaaagaatataagaatgaagcggtaatgataaaatcaatcgttatctaaaatgatcatactcatttattttattctattatattaacacatacatttttaacagcaacacattcaatattgtattgttatttttatattatttacacaattaacaatatattattagtttatattactgaattaataatataaaattcccaatcttgtcataaacacacactgagaaacagcataaacacagaatccatcaaaaatgttgataaattatctgatgttgttgttcgctgctatgataatcagatcattcgccgatagtggtaacgctatcgaaacgacattgccagaaattacaaacgctacaacagatattccagctatcagattatgcggtccagagggagatggatattgtttacacggtgactgtatccacgctagagatattgacggtatgtattgtagatgctctcatggttatacaggcattagatgtcagcatgtagtattagtagactatcaacgttcagaaaacccaaacactacaacgtcatatatcccatctcccggtattatgcttgtattagtaggcattattatgtgttgtctattatctgtttataggttcactcgacgaactaaactacctatacaagatatggttgtgccataatttttataaatttttttatgagtatttttacaaaaatgtataaagtgtatgtcttatgtatatttataaaaatgctaagtatgcgatgtatctatgttatttgtatttatctaaacaatacctctacctctagatattatacaaaaattttttatttcggcatattaaagtaaaatctagttaccttgaaaatgaatacagtgggtggttccgtatcaccagtaagaacataatagtcaaatacagtatccgattgagattttgcatacaatactagtctagaaagaaatttgtaatcatcttctgtgacgggagtccatatatctgtatcatcgtctagtttatcagtgtcccatgctatattcctgttatcatcattagttaatgaaaataactctcgtgcttcagaaaagtcaaatattgtatccatacatacatctccaaaactatcgcttatacgtttatctttaacgatacctatacctagatggttatttactaacagacattttccagatctattgactataactcctatagtttccacatcaaccaagtaatgatcatctattgttatataacaataacataactcttttccatttttatcagtatgtatatctatatcaacgtcgtcgttgtagtgaatagtagtcattgatctattatatgaaacggatatgtctagaacggcaattgttttacgtccagttaacactttcgttgatttaaagtctagagtctttgcaaacataatatccttatccgactttatatttcctgtagggtggtataattttattttgcctccacatatcggtgtttccaaatatattactagacaatattccatatagttattagttaagggtacccaattagaacacgtacgcttattatcatcatttggatcgtatttcataaaagttattgtgttatcgatgtcaacacattctacattttttaatcgtctatatagtatttttctgatattttctataatatcagaattgtcttccatcggaagttgtatactatcggaatcagttacatgtttaaataattctctgatgtcattccttatacaatcaaattcattattaaacagtttaatagtctgtagacctttatcgtcgtaaatatccattgtcttattagttacgcttatttttatgtgtttttacgttgctttattatattttataagaatgattgtttgacgaatcacgagaactattaagacacattattaggtatatattataaaaaagtttttgattacgatgttataagaggaaagaggacacattaacatcatacatcaattaactacattcttataacatcgtaatcaaaagaattgcaattttgatgtataacaactgtcaatgggttatggaattgtatattacatattatacggtatgttggtaacgacaaataccggtcggtaattgtctgccggtgtaatagaattatatatatctatctattacaccggccttgtatacataataataagttgtggtagtatgatctccatatttataatttaggactttgtattcagtatttttggaatcataaaaaataaaaaaaagttttactaatttaaaatttaaaaagtatttacatttttttcactgtttagtcgcggatatggaattcgatcctgccaaaatcaatacatcatctatagatcatgtaacaatattacaatacatagatgaaccaaatgatataagactaacagtatgcattatccgaaatattatatcaatatcacaaaaataaatacacatttggctaatcaatttcgggcttggaaaaaacgtatcgccggaagggactatatgactaacttatctagagatacaggaatacaacaatcaaaacttactgaaactatacgtaactgtcaaaaaaatagaaacatatatggtctatatatacactacaatttagttattaattggataaccgatgtgattatcaatcaatattaagagggttggtaaattggtacatagctaataatacctatactccaaatacacccaataatacaacaaccatttctgagttggatatcatcaaaatactaaataaatacgaggacgtgtatagagtaagtaaagaaaaagaatgtggaatttgctatgaagttgtttactcaaaacgatagatactttggtttattggattcgtgtactcatatattttgcataacatgcatcaatatatggcatagaacacgaagagaaaccggtgcgtcggataattgtcctatatgccgtacccgttttagaaacataacaatgagcaagttctataagctagttaactaataaataaaaagtttaatttgttgacgacgtatgtcgttattttttctcgtataaaagattaatttgattctaatataatctttagtattggataaatatcaattcaaattaattccattagattatatcataaataaaaatagtagcacacaactacttcagcaaacattctttttataaatgccatctagcgtagcgaggacacaagtgaacctataattatcaaatttattagtatcagtcacatgaaggactttacgtagagtgacgattccactatctgtggtacgaacggtttcatcttctttgatgccatcacccagatgttctataaacttggtatcctcgtccgatttcatatcctttgccaaccaatacatatagctaaactcaggcatatgttccacacatcctgaacaatgaaattctccagaagatgttacaatgtctagatttggacatttggtttcaaccgcgttaacatatgagtgaacacacccatacatgaaagcgatgagaaataggattctcatcttgccaaaatatcactagaaaaaatttatttatcagttttaaaggtataaaaaatacttattgttgctcgaatattttgtatttgatggtatacggaagattagaaatgtaggtattatcatcaactgattctatggttttatgtattctatcatgtttcactattgcgttggaaataatatcatatgcttccacatatattttattttgttttaactcataatactcacgtaattctggattattggcatatctatgaataattttagctccatgatcagtaaatattaatgagaacatagtattaccacctaccattatttttttcatctcattcaattcttaattgcaaagatctatataatcattatagcgttgacttatggactctggaatcttagacgatgtacagtcatctataatcatggcatatttaatacattgttttatagcatagtcgttatctacgatgttagatatttctctcaatgaatcaatcacacaatctaatgtaggtttatgacataatagcattttcagcagttcaatgtttttagattcgttgatggcaatggctatacatgtatatccgttatttgatctaatgttgacatctgaaccggattctagcagtaaagatactagagattgtttattatatctaacagccttgtgaagaagtgtttctcctcgtttgtcaatcatgttaatgtctttaagataaggtaggcaaatgtttatagtactaagaattgggcaagcataagacatgtcacaaagacccttttttgtatgtataagtgtaaaaattataacatccatagttggatttacataggtgtccaatcgggatctctccatcatcgagataattgatggcatctcccttccttttttagtagatatttcatcgtgtaagaatcaatattaatatttctaaagtatccgtgtatagcctctttatttaccacagctccatattccactagagggatatcgccgaatgtcatatactcaattagtatatgttggaggacatccgagttcattgttttcaatatcaaagagatggtttccttatcatttctccatagtggtacaatactacacattattccgtgcggctttccattttccaaaaacaatttgaccaaatctaaatctacatctttattgtatctataatcactatttagataatcagccataattcctcgagtgcaacatgttagatcgtctatatatgaataagcagtgttatctattcctttcattaacaatttaacgatgtctatatctatatgagatgacttaatataatattgaagagctgtacaatagtttttatctataaaagacggcttgattccgtgattaattagacatttaacaacttccggacgcacatatgctctcgtatccgactctgaatacagatgagagatgatatacagatgcaatacggtaccgcaatttcgtagttgataatcatcatacgcgtatcagtactcgtcctcataaagaacactgcagccattttctatgaacaaatcaataattttagaaacaggatcattgtcattacataattttctataactgaacgatggttttcacatttaacactcaagtcaaatccatgttctaccaacacctttatcaagtcaacgtctacatttttggatttcatatagctgaatatattaaagttatttatgttgctaaatccagtggcttctagtagagccatcgctatatccttattaactttaacatgtctactatttgtgtattcttctaatggggtaagctgtctccaatttttgcgtaatggattagtgccactgtctagtagtagtttgacgacctcgacattattacaatgctcattaaaaaggtatgcgtgtaaagcattattcttgaattggttcctggtatcattaggatctctgtctttcaacatctgtttaagttcatcaagagccacctcctcattttccaaatagtcaaacattttgactgaatgagctactgtgaactctatacacccacacaactaatgtcattaaatatcatgtcaaaaacttgtacaattattaataaaaataatttagtgtttaaattttaccagttccagattttacacctccgttaatacctccattaaccccactggacgatcctcctccccacattccaccgccaccagatgtataagttttagatcctttattactaccatcatgtccatggataaagacactccacatgccgccactaccccctttagaagacatattaataagacttaaggacaagtttaacaataaaattaatcacgagtaccctactaccaacctacactattatatgattatagtttctatttttacagtaccttgactaaagtttctagtcacaagagcaatactaccaacctacactattatatgattatagtttctatttttataggaacgcgtacgagaaaatcaaatgtctaatttctaacggtagtgttgataaacgattgttatccgcggatacctcctctatcatgtcgtctattttcttactttgttctattaacttattagcattatatattatttgattataaaacttatattgcttattagcccaatctgtaaatatcggattattaacatatcgtttctttgtaggtttatttaacatgtacatcactgtaagcatgtccttaccatttattttaatttgacgcatatccgcaatttctttttcgcagtcggttataaattctatatatgatggatacatgctacatgtgtacttataatcgactaatatgaagtacttgatacatattttcagtaacgatttattattaccacctatgaataagtacctgtgatcgtctaggtaatcaactgttttcttaatacattcgatggttggtaatttactcagaataatttccaatatcttaatatataattctgctatttctgggatatatttatctgccagtataacacaaatagtaatacatgtaaacccatattttgttattatattaatgtctgcgccattatctattaaccattctactaggctgacactatgcgactcaatacaatgataaagtatactacatccatgtttatctattttgtttatatcatcaatatacggcttacaaagttttagtatcgataacacatccaactcacgcatagagaaggtagggaataatggcataatatttattaggttatcatcattgtcattatctacaactaagtttccattttttaaaatatactcgacaactttaggatctctattgccaaatttttgaaaatatttatttatatgcttaaatctatataatgtagctccttcatcaatcatacatttaataacattgatgtatactgtatgataagatacatattctaacaatagatcttgtatagaatctgtatatcttttaagaattgtggatattaggatattattacataaactattacacaattctaaaatataaaacgtatcacggtcgaataatagttgatcaactatataattatcgattttgtgatttttcttcctaaactgtttacgtaaatagttagatagaatattcattagttcatgaccactatagttactatcgaataacgcgtcaaatatttcccgtttaatatcgcatttgtcaagataataatagagtgtggtatgttcacgataagtataataacgcatctctttttcgtgtgaaattaaatagtttattacgtccaaagatgtagcataaccatcttgtgacctagtaataatataataatagagaactgttttacccattctatcatcataatcagtggtgtagtcgtaatcgtaatcgtctaattcatcatcccaattataatattcaccagcacgtctaatctgttctattttgatcttgtatccatactgtatgttgctacatgtaggtattcctttatccaataatagtttaaacacatctacattgggatttgatgttgtagcgtatttttctacaatattaataccatttttgatactatttatttctatacctttcgaaattagtaatttcaataagtctatattgatgttatcagaacatagatattcgaatatatcaaaatcattgatatttttatagtcgactgacgacaataacaaaatcacaacatcgtttttgatattattatttttcttggtaacgtatgcctttaatggagtttcaccatcatactcatataatggatttgcaccactttctatcaatgattgtgcactgctggcatcgatgttaaatgttttacaactatcatagagtatcttatcgttaaccatgattggttgttgatgctatcgcattttttggtttctttcatttcagttatgtatggatttagcacgtttgggaagcatgagctcatatgatttcagtactgtagtgtcagtactattagtttcaataagatcaatctctagatctatagaatcaaaacacgataggtcagaagataatgaatatctgtaggcttcttgttgtactgtaacttctggttttgttagatggttgcatcgtgctttaacgtcaatggtacaaattttatcctcgctttgtgtatcatattcgtccctactataaaattgtatattcagattatcatgcgatgtgtatacgctaacggtatcaataaacggagcacaccatttagtcataaccgtaatccaaaaatttttaaagtatatcttaacgaaagaagttgtgtcattgtctacggtgtatggtactagatcctcataagtgtatatatctagagtaatgtttaatttattaaatggttgataatatggatcctcgtgacaatttccgaagatggaaataagacataaacacgcaataaatctaattgcggacatggttactccttaaaaaaatacgaataatcaccttggctatttagtaagtgtcatttaacactatactcatattaatccatggactcataatctctatacgggattaacggatgttctatatacggggatgagtagttctcttctttaactttatactttttactaatcatatttagactgatgtatgggtaatagtgtttgaagagctcgttctcatcatcagaataaatcaatatctctgtttttttgttatacagatgtattacagcctcatatattacgtaatagaacgtgtcatctaccttattaactttcaccgcatagttgtttgcaaatacggttaatcctttgacctcgtcgatttccgaccaatctgggcgtataatgaatctaaactttaattgcttgtaatcattcgaaataatttttagtttgcatccgtagttatcccctttatgtaactgtaaatttctcaacgcgatatctccattaataatgatgtcgaattcgtgctgtatacccatactgaatggatgaacgaataccgacggcgttaatagtaatttactttttcatctttacatattgggtactagttttactatcataagtttataaattccacaagctactatggaataagccaaccatcttagtataccacacatgtcttaaagtttattaattaattacatgttgttttatatatatcgctacgaatttaaagagaaattagtttaggaagaaaaattatctatctacatcatcacgtctctgtattctacgatagagtgctactttaagatgcgacagatccgtgtcatcaaatatatactccattaaaatgattattccggcagcgaacttgatattggatatatcacaacctttgttaatatctacgacaatagacagcagtcccatggttccataaacagtgagtttatctttctttgaagagatattttgtagagatcttataaaactgtcgaatgacatcgcatttatatctttagctaaatcgtatatgttaccatcgtaatatctaaccgcgtctatcttaaacgtttccatcgctttaaagacgtttccgatagatggtctcatttcatcagtcatactgagccaacaaatataatcgtgtataacatctttgatagaatcagactctaaagaaaacgaatcggctttattatacgcattcatgataaacttaatgaaaaatgtttttcgttgtttaagttggatgaatagtatgtcttaataattgttattatttcattaattaatatttagtaacgagtacactctataaaaacgagaatgacataactaatcataactagttatcaaagtgtctaggacgcgtaattttcatatggtatagatcctgtaagcattgtctgtattctggagctattttctctatcgcattagtgagttcagaatatgttataaatttaaatcgaataacgaacataactttagtaaagtcgtctatattaactcttttattttctagccatcgtaataccatgtttaagatagtatattctctagttactacgatctcatcgttgtctagaatatcacatactgaatctacatccaattttagaaattggtctgtgttacatatctcttctatattattgttgatgtattgtcgtagaaaactattacgtagaccattttctttataaaacgaatatatagtactccaattatctttaccgatatatttgcacacataatccattctctcaatcactacatctttaagattttcgttgttaagatatttggctaaactatataattctattagatcatcaacagaatcagtatatatttttctagatccaaagacgaactctttggcgtcctctataatattcccagaaaagatattttcgtgttttagtttatcgagatctgatctgttcatatacgccatgattgtacggtacgttatgataaccgcataaaataaaaatccattttcatttttaaccaatactattcataattgagattgatgtaatactttgttactttgaacgtaaagacagtacacggatccgtatctccaacaagcacgtagtaatcaaatttggtgttgttaaacttcgcaatattcatcaatttagatagaaacttatactcatcatctgttttaggaatccatgtattattaccactttccaacttatcattatcccaggctatgtttcgtccatcatcgttgcgcagagtgaataattcttttgtattcggtagttcaaatatatgatccatgcatagatcggcaaagctattgtagatgtgatttttcctaaatctaatataaaactcgtttactagcaaacactttcctgatttatcgaccaagacacatatggtttctaaatctatcaagtggtggggatccatagttatgacgcagtaacatatattattacattcttgactgtcgctaatatctaaatatttattgttatcgtattggattctgcatatagatggcttgtatgtcaaagatatagaacacataaccaatttatagtcgcgctttacattctcgaatctaaagttaagagatttagaaaacattatatcctcggatgatgttatcactgtttctggagtaggatatattaaagtctttacagatttcgtccgattcaaataaatcactaaataatatcccacattatcatctgttagagtagtatcattaaatctattatattttatgaaagatatatcactgctcacctctatatttcgtacatttttaaactgtttgtataatatctctctgatacaatcagatatatctattgtgtcggtagacgataccgttacatttgaattaatggtgttccattttacaacttttaacaagttgaccaattcatttctaatagtatcaaactctccatgattaaatattttaatagtatccattttatatcactacggacacaaagtagctgacataaaccattgtataatttttatgttttatgtttattagcgtacacattttggaagttccggcttccatgtatttcctggagagcaagtagatgatgaggaaccagatagtttatatccgtacttgcacttaaagtctacattgtcgttgtatgagtatgatcttttaaacccgctagacaagtatccgtttgatattgtaggatgtggacatttaacaatctgacacgtgggtggatcggaccattctcctcctgaacacaggacactagagttaccaatcaacgaatatccactattgcaactataagttacaacgctcccatcggtataaaaatcctcgtatccgttatgtcttccgttggatatagatggaggggattggcatttaacagattcacaaataggtgcctcgggattccataccatagatccagtagatcctaattcacaatacgatttagattcaccgatcaactgatatccgctattacaagagtacgttatactagagccaaagtctactccaccaatatcaagttggccattatcgatatctcgaggcgatgggcatctccgtttaatacattgattaaagagtgtccatccagtacctgtacatttagcatatataggtcccattttttgctttctgtatccaggtagacatagatattctatagtgtctcctatgttgtaattagcattagcatcagtctccacactattcttaaatttcatattaatgggtcgtgacggaatagtacagcatgatagaacgcatcctattcccaacaatgtcaggaacgtcacgctctccaccttcatatttatttatccgtaaaaatgttatcctggacatcgtacaaataataaaaagcccatatatgttcgctattgtagaaattgtttttcacagttgctcaaaaacgatggcagtgacttatgagttacgttacactttggagtctcatctttagtaaacatatcataatattcgatattacgagttgacatatcgaacaaattccaagtatttgattttggataatattcgtattttgcatctgctataattaagatataatcaccgcaagaacacacgaacatctttcctacatggttaaagtacatgtacaattctatccatttgtcttccttaactatatatttgtatagataattacgagtctcgtgagtaattccagtaattacatagatgtcgccgtcgtactctacagcataaactatactatgatgtctaggcatgggagacttttttatccaacgatttttagtgaaacattccacatcgtttaatactacatatttctcatacgtggtataaactccacccattacatatatatcatcgtttacgaataccgacgcgcctgaatatctaggagtaattaagtttggaagtcttatccatttcgaagtgccgtgtttcaaatattctgccacacccgttgaaatagaaaattctaatcctcctattacatataactttccatcgttaacacaagtactaacttctgattttaacgacgacatattagtaaccgttttccattttttcgttttaagatctacccgcgatacggaataaacatgtctattgttaatcatgccgccaataatgtatagacaattatgtaaaacatttgcattatagaattgtctatctgtattaccgactatcgtccaatattctgttctaggagagtaatgggttattgtggatatataatcagagtttttaatgactactatattatgttttataccatttcgtgtcactggctttgtagatttggatatagttaatcccaacaatgatatagcattgcgcatagtattagtcataaacttgggatgtaaaatgttgatgatatctacatcgtttggatttttatgtatccactttaataatatcatagctgtaacatcctcatgatttacgttaacgtcttcgtgggataagatagttgtcagttcatcctttgataattttccaaattctggatcggatgtcaccgcagtaatattgttgattatttctgacatcgacgcattatatagttttttaattccatatcttttagaaaagttaaacatccttatacaatttgtgaaattaatattatgaatcatagtttttacacatagatctactacaggcggaacatcaattattatggcagcaactagtatcatttctacattgtttatggtgatgtttatcttcttccagcgcatatagtctaatagcgattcaaacgcgtgatagtttataccattcaatataatcgcttcatcctttagatggtgatcctgaatgcgtttaaaaaaattatacggagacgccgtaataatttccttattcacttgtataatttccccattgatagaaaatattacgctttccattcttaaagtactataagtaattatagtataatgtaaacgtttatatattcaatatttttataaaaatcattttgacattaattcctttttaaatttccgtctatcatctatagaaacgtattctatgaatttataaaatgcttttacgtgtcctatcgtaggcgatagaaccgctaaaaagcctatcgaatttctacaaaagaatctgttatatggtatagggagagtataaaacattaaatgtccgtacttattaaagtattcagtagccaatcctaactctttcgaatacttattaatggctcttgttctgtacgaatctatttttttgaacaacggacctagtggtatatcttgttctatgtatctaaaataatgtctgactagatccgttagtttaatatccgcagtcatcttgtctagaatggcaaatctaactgcgggtttaggctttagtttagtttctatatctacatctatgtctttatctaacaccaaaaatataatagctaatattttattacaatcatccggatattcttctacgatctcactaactaatgtttctttggttatactagtatagtcactatcggacaaataaagaaaatcagatgatcgatgaataatacatttaaattcatcatctgtaagatttttgagatgtctcattagaatattattagggttagtactcattatcattcggcagctattacttattttattatttttcaccatatagatcaatcattagatcatcaaaatatgtttcaatcatcctaaagagtatggtgaatgactcttcccatctaatttctgaacgttcaccaatgtctctagccactttggcactaatagcgatcattcgcttagcgtcttctatattattaactggttgatttaatctatctagcaatggaccgtcggacagcgtcattctcatgttcttaatcaatgtacatacatcgccgtcatctaccaattcatccaacaacataagctttttaaaatcatcattataataggtttgatcgttgtcatttctccaaagaatatatctaataagtagagtcctcatgcttagttaacaactattttttatgttaaatcaattagtacaccgctatgtttaatacttattcatattttagtttttaggattgagaatcaatacaaaaattaatgcatcattaattttagaaatacttagtttccacgtagtcaatgaaacatttgaactcatcgtacaggacgttctcgtacaggacgtaactataaaccggtttatatttgttcaagatagatacaaatccgataactttttttacgaattctacgggatccactttaaaagtgtcataccgggttctttttatttttttaaacagatcaatggtgtgatgttgattaggtcttttacgaatttgatatagaatagcgtttacatattctccataatggtcaatcgccatttgttcgtatgtcataaattctttaattatatgacactgtgtattatttagttcatccttgttcattgttaggaatctatccaaaatggcaattatactagaactataggtgcgttgtatacacatattgatgtgtctgtttatacaatccatgatatttggatccatgctactaccttcgggtaaaattgtagcatcatataccatttctagtactttaggttcattattatccattgcagaggacgtcatgatcgaatcataaaaaaatatattatttttatgttattttgttaaaaataatcatcgaatacttcgtaagatactccttcatgaacataatcagttacaaaacgtttatatgaagtaaagtatctacgatttttacaaaagtccggatgcataagtacaaagtacgcgataaacggaataataatagatttatctagtctatctttttctatagctttcatagttagatacatggtctcagaagtaggattatgtaacatcagcttcgataaaatgactgggttatttagtcttacacattcgctcatacatgtatgaccgttaactacagagtctacactaaaatgattgaacaatagatagtctaccattgtttcgtattcagatagtacagcgtagtacatggcatcttcacaaattatatcattgtctaatagatatttgacgcatcttatggatcccacttcaacagccatcttaaaatcatattgctttcctttatcattaataatttctagaacatcatctctatcataaaagatacaaatattaactgtttgatccgtaataacattgctagtcaatagcaatttgttaataagatgcgctgggctcaatgtcttaataagaagtgtaagaggactatctccgaatttgttttgtttattaacatccgttgatggaagtaaaagatctataatgtctacattcttgactgttttagagcatacaatatggagaggtgtatttccatcatgatctggttttgagggactaattcctagtttcatcatccatgagattgtagaagcttttggattgtctgacataagatgtctatgaatatgatttttgccaaatttatccactatcctggcttcgaatccgatggacattatttttttaaacactctttctgaaggatctgtacacgccaacaacggaccacatccttcttcatcaaccgagttgttaatcttggctccatactgtaccaataaatttattctctctatgacttcatcatctgttcccgagagataatatagaggtgttttatgctgtttatcacacgcgtttggatctgcgccgtgcgtcagcagcatcgcgactattctattattattaattttagaagctatatgcaatggataatttccatcatcatccgtctcatttggagagtatcctctatgaagaagttcttcgacaaatcgttcatctagtcctttaattccacaatacgcatgtagaatgtgataattatttccagaaggttcgatagcttgtagcatattcctaaatacatctaaatttttactattatatttggcataaagagatagataatactcggccgacataatgttgtccattgtagtataaaaattaatatttctatttctatttctgtatatttgcaacaatttactctctataacaaatatcataacttagtttttttatgtcaagaaggcactggtttagttcatctataaatgtcacgccataactaccacgcatgccatactcagaattatgataaagatatttatccttggggtgtaggtaatggggattaatctttgttggatcagtctctaagttaacacatgtcacacatgatccatttatagttatatcacacgatgatgatttatgaattgattccggaagatcgctatcgtattttgtggttccacaattcatttccatacatgttattgtcacactaatattatgatgaactttatctagccgctgagtggtaaacaacagaacagatagtttattatctttaccaacaccctcagccgctgccacaaatctctgatccgtatccatgatggtcatgtttatttctagtccgtatccagtcaacactatgttagcatttctgtcgatatagctttcactcatatgacactcaccaataatagtagaattaatgtcgtaatttacaccaatagtgagttcggcggcaaagtaccaataccggtaatcttgtcgaggaggacatatagtattcttgtattctaccgaatacccgagagatgcgatacaaaagagcaagactaatttgtaaaccatcttactcaaaatatgtaacaatagtacgatgcaatgagtaagacaataggaaatctatcttatatacacataattattctatcaattttaccaattagttagtgtaatgttaacaaaaatgtgggagaatctaattagtttttctttacacaattgacgtacatgagtctgagttccttgtttttgctaattatttcatccaatttattattcttgacgatatcgagatcttttgtataggagtcaaacttgtattcaacatgcttttctataatcattttagctatttcggcatcatccaatagtacattttccagattagcagaatagatattaatgtcgtatttgaacagagcctgtaacatctcaatgtctttattatctatagccaatttaatgtccggaatgaagagaagggaattattggtgtttgtcgacgtcatatagtcgagcaagagaatcatcatatccacgtgtccattttttatagtgatgtgaatacaactaaggagaatagccagatcaaaagtagatggtatctctgaaagaaagtaggaaacaatacttacatcattaagcatgacggcatgataaaatgaagttttccatccagttttcccatagaacatcagtctccaatttttcttaacaaacagttttaccgtttgcatgttaccactatcaaccgcataatacaatgcggtgtttcccttgtcatcaaattgtgaatcatccagtccactgaatagcaaaatctttactattttggtatcttccaatgtggctgcctgatgtaatggaaattcattctctagaagatttttcaatgctccagcgttcaacaacgtacatactagacgcacgttattatcagctattgcataatacaaggcactatgtccatggacatccgccttaaatgtatctttactagagagaaagcttttcagctgcttagacttccaagtattaattcgtgacagatccatgtctgaaacgagacgctaattagtgtatattttttcattttttataattttgtcatattgcaccagaattaataatatctttaatagatctgattagtagatacatggctatcgcaaaacaacatatacacatttaataaaaataatatttattaagaaaattcagatttcacgtacccatcaatataaataaaataatgattccttacaccgtacccatattaaggagattccaccttacccataaacaatataaatccagtaatatcatgtctgatgatgaacacaaatggtgtattaaattccagtttttcaggagatgatctcgccgtagctaccataatagtagatgcctctgctacagttccttgttcgtcgacatctatctttgcattctgaaacattttataaatatataatgggtccctagtcatatgtttaaacgacgcattatctggattaaacatactaggagccatcatttcggctatcgacttaatatccctcttattttcgatagaaaatttagggagtttaagattgtacactttattccctaattgagacgaccaatagtctaattttgcagccgtgatagaatctgtgaaatgggtcatattatcacctattgccaggtacatactaatattagcatccttatacggaaggcgtaccatgtcatattctttgtcatcgattgtgattgtatttccttgcaatttagtaactacgttcatcatgggaaccgttttcgtaccgtacttattagtaaaactagcattgcgtgttttagtgatatcaaacggatattgccatatacctttaaaatatatagtattaatgattgcccatagagtattattgtcgagcatattagaatctactacattagacataccggatctacgttctactatagaattaattttattaaccgcatctcgtctaaagtttaatctatataggccgaatctatgatattgttgataatacgacggtttaatgcacacagtattatctacgaaactttgataagttagatcagtgtacgtatatttagatgttttcagcttagctaatcctgatattaattctgtaaatgctggacccagatctctttttctcaaatccatagtcttcaataattctattctagtattacctgatgcaggcaatagcgacataaacatagaaaacgaataaccaaacggtgagaagacaatattatcatcttgaatatttttatacgctactataccggcattggtaaatccttgtagacgataggcggacgctgaacacgctaacgatagtatcaataacgcaatcatgattttatggtattaataattaaccttatttttatgttcggtataaaaaaattattgatgtctacacatccttttgtaattgacatctatatatccttttgtataatcaactctaatcactttaacttttacagttttccctaccagtttatccctatattcaacatatctatccatatgcatcttaacactctctgccaagatagcttcagagtgaggatagtcaaaaagataaatatatagagcataatcattctcgtatactctgccctttattacatcacccgcattgggcaacgaataacaaaatgcaagcatcttgttaacgggctcgtaaattgggataaaaattatgtttttattgtcttatatctattttattcaagagaatattcaggaatttctttttccggttgtatctcgtcgcagtatatatcatttgtacattgtttcatattttttaatagtttacaccttttagtaggactagtatcgtacaattcatagctgtattttgaattccaatcacgcataaaaatatcttccaattgttgacgaagacctaatccatcatccggtgtaatattaatagatgctccacatgtatccgtaaagtaatttcctgtccaatttgaggtacctatataggccgttttatcggttaccatatatttggcatggtttaccctagaatacggaatgggaggatcagcatctggtacaataaatagctttacttctatatttatgtttttagattttagcatagcgatagatcttaaaaagtttctcatgataaacgaagatcgttgccagcaactaatcaatagcttaacggatacttgtctgtctatagcggatcttcttaattcatcttctatataaggccaaaacaaaattttacccgccttcgaataaataatagggataaagttcataacagatacataaacgaatttactcgcatttctaatacatgacaataaagcggttaaatcattggttctttccatagtacatagttgttgcggtgcagaagcaataaatacagagtgtggaacgccgcttacgttaatactaagaggatgatctgtattataatacgacggataaaagtttttccaattatatggtagattgttaactccaagataccagtatacctcaaaaatttgagtgagatccgctgccaagttcctattattgaagatcgcaatacccaattccttgacctgagttagtgatctccaatccatgttagcgcttcctaaataaatatgtgtattatcagatatccaaaattttgtatgaagaactcctcctaggatatttgtaatatctatgtatcgtacttcaactccggccatttgtagtctttcaacatcctttaatggtttgttagatttattaacggctactctaactcgtactcctcttttgggtaattgtacaatctcgtttaatattatcgtgccgaaattcgtacccacttcatccgataaactccaataaaaagatgatatatctagtgtttttgtggtattggatagaatttccctccacatgttaaatgtagacaaatatactttatcaaattgcatacctataggaatagtttctgtaatcactgcgattgtattatccggattcattttatttgttaaaagaataatcctatatcacttcactctattaaaaatccaagtttctatttctttcatgactgattttttaacttcatccgtttccttatgaagatgatgtttggcaccttcataaatttttatttctctattacaatttgcatgttgcatgaaataatatgcacctaaaacatcgctaatcttattgtttgttccctggagtatgagagtcggggggtgttaatcttggaaattatttttctaaccttgttggtagccttcaagacctgactagcaaatccagccttaattttttcatgattgactaatgggtcgtattggtatttataaactttatccatatctctagatactgattctggacatagctttccgactggcgcatttggtgtgatggttcccataagtttggcagctagcagattcagtcttgaaacagcatctgcattaactagaggagacattagaatcattgctgtaaacaagtttggattatcgtaagaggctagctcccatggaatgacccaataagtagatttaatagttaccacgtgctgtaccaaagtcatcaatcatcattttttcaccattacttcttccatgtccaatatgatcatgtgagaatactaaaattcctaacgatgatatgttttcagctagttcgtcataacgtccagaatgtttaccagctccatgacttatgaatactaatgccttaggatatgtaataggtttccaatatttacaatatatgtaatcattgtccagattgaacatacagtttgcactcatgattcacgttatataactatcaatattaacagttcgtttgatgatcatattatttttatgttttattgataattgtaaaaacatacaattaaatcaatatagaggaaggagacggctactgtcttttgtaagatagtcatggcgactaaattagattatgaggatgctgttttttactttgtggatgatgataaaatatgtagtcgcgactccatcatcgatctaatagatgaatatattacgtggagaaatcatgttatagtgtttaacaaagatattaccagttgtggaagactgtacaaggaattgatgaagttcgatgatgtcgctatacggtactatggtattgataaaattaatgagattgtcgaagctatgagcgaaggagaccactacatcaattttacaaaagtccatgatcaggaaagtttattcgctaccataggaatatgtgctaaaatcactgaacattggggatacaaaaagatttcagaatctagattccaatcattgggaaacattacagatttgatgaccgacgataatataaacatcttgatactttttctagaaaaaaaattgaattgatgatataggggtcttcataacgcataattattacgttagcattctatatccgtgttaaaaaaaattatcctatcatgtatttgagagttttatatgtagcaaacatgatagctgtgatgccaataagctttagatattcacgcgtgctagtgttagggatggtattatctggtggtgaaatgtccgttatataatctacaaaacaatcatcgcatatagtatgcgatagtagagtaaacatttttatagtttttactggattcatacatcgtctacccaattcggttataaatgaaattgtcgccaatcttacacccaaccccttgttatccattagcatagtattaacttcgttatttatgtcataaactgtaaatgattttgtagatgccatatcatacatgatattcatgtccctattataatcattactaactttatcacaatatatgttgataatatctatatatgatctagtctttgtgggcaactgtctatacaagtcgtctaaacgttgtttactcatatagtatcgaacagccatcattacatggtcccgttccgttgatagataatcgagtatgttagtggacttgtcaaatctatataccatattttctggaagtggatatacatagtcgtgatcaacattattgctagcctcatcttctatatcctgtactataccattatctatatcatctacataatctatgatattattacacataaacatcgacaacatactattgtttattatctaagtcctgttgatccaaacccttgatctcctctatttgtactatctagagattgtacttcttccagttctggataatatatacgttgatagattagctgagctattctatctccagtatttacattaaacgtacattttccattattaataagaatgactcctatgtttcccctataatcttcgtctattacaccacctcctatatcaatgccttttagtgacagaccagacctaggagctattctaccatagcagaacttaggcatggacatactaatatctgtcttaattaactgtctttctcctggagggatagtataatcgtaagcgctatacaaatcatatccggcagcacccggcgattgcctagtaggagatttagctctgttagtttccttaacaaatctaactggtgagttaatattcatgttgaacataaaactaatattttatttcaaaattatttaccatcccatatattccatgaataagtgtgatgattgtacacttctatagtatctatatacgatccacgataaaatcctcctatcaatagcagtttattatccactatgatcaattctggattatccctcggataaataggatcatctatcagagtccatgtattgctggattcacaataaaattccgcatttctaccaaccaagaataaccttctaccgaacactaacgcgcatgatttataatgaggataataagtggatggtccaaactgccactgatcatgattgggtagcaaatattctgtagttgtatcagtttcagaatgtcctcccattacgtatataacattgtttatggatgccactgctggattacatctaggtttcagaagactcggcatattaacccaagcagcatccccgtggaaccaacgctcaacagatgtgggatttggtagacctcctactacgtataatttattgttagcgggtatcccgctagcatacagtctggggctattcatcggaggaattggaatccaattgtttgatatataatttacagctatagcattgttatgtatttcattgttcatccatccaccgatgagatatactacttctccaacatgagtacttgtacacatatggaatatatctataatttgatccatgttcataggatactctatgaatggatacttgtatgatttgcgtggttgtttatcacaatgaaatattttggtacagtctagtatccattttacattatttatacctctgggagaaagataatttgacctgattacatttttgataaggagtagcagatttcctaatttatttcttcgcctcatataccacttaatgacaaaatcaactacataatcctcatctggaacatttagttcatcgctttctagaataagtttcatagatagataatcaaaattgtctatgatgtcatcttccagttccaaaaagtgtttggcaataaagtttttagtatgacataagagattggatagtccgtattctatacccatcatgtaacactcgacacaatattcctttctaaaatctcgtaagataaagtttatacaagtgtagatgataaattctacagaggttaatatagaagcacgtaataaattgacgacgttatgactatctatatatacctttccagtatatgagtaaataactatagaagttaaactgtgaatgtcaaggtctagacaaacccttgtaactggatctttatttttcgtgtatttttgacgtaaatgtgtgcgaaagtaaggagataactttttcaatatcgtagaattgactattatattgcctcctatggcatcaataattgttttgaatttcttagtcatagacaatgctaatatattcttacagtacacagtattgacaaatatcggcatttatgtttctttaaaagtcaacatctagagaaaaatgattatctttttgagacataactcccattttttggtattcacccacacgtttttcgaaaaaattagtttttccttccaatgatatattttccatgaaatcaaacggattggtaacattataaatttttttaaatcccaattcagaaatcaatctatccgcgacgaattctatatatgttttcatcatttcacaattcattcctataagtttaactggaagagccgcagtaagaaattcttgttcaatggatactgcatctgttataatagatctaacggtttcttcactcggtggatgcaataaatgtttaaacatcaaacatgcgaaatcgcagtgcagaccctcgtctctactaattagttcgttggaaaacgtgagtccgggcattaggccacgctttttaagccaaaatatggaagcgaatgatccagaaaagaaaattccttctactgcagcaaaggcaataagtctctctccataaccggcgctgtcatgtatccacttttgagcccaatcggccttcttttttacacaaggcatcgtttctatggcattaaagagatagtttttttcattactatctttaacataagtatcgatcaaaagactatacatttccgaatgaatgttttcaatggccatctgaaatccgtagaaacatctagcctcggtaatctgtacttctgtacaaaatcgttccgccaaattttcattcactattccgtcactggctgcaaaaaacgccaatacatgttttataaaatatttttcgtctggtgttagtttattccaatcattgatatctttagatatatctacttcttccactgtccaaaatgatgcctctgcctttttatacatgttccagatgtcatgatattggattgggaaaataacaaatctatttggatttggtgcaaggatgggttccataactaaattaacaataacaataaattttttttcagttatctatatgcctgtacttggattttttgtacatcgatatcgccgcaatcactacaataattacaagtattattgatagcattgttattagtactatcataattaaattatctacattcatgggtgctgaataatcgttattatcatcattatcattttgtaattgtgacatcatactagataaatcgtttgcgagattgttgtgggaagcgggcatggaggatgcattatcattattatttaacgccttccatttggattcacaaatgttacgcacattcaacattttatggaaactataattttgtgaaaacaaataacaagaaaactcgtcatcgttcaaatttttaacgatagtaaaccgattaaacgtcgagctaatttctaacgctagcgactctgttggatatgggtttccagatatatatcttttcagttcccctacgtatctataatcatctgtaggaaatggaagatatttccatttatctactgttcctaatatcatatgtggtggtgtagtagaaccattaagcgcgaaagatgttatttcgcatcgtattttaacttcgcaataatttctggttagataacgcactctaccagtcaagtcaatgatattagcctttacagatatattcatagtagtcgtaacgatgactccatcttttagatgcgatactcctttgtatgtaccagaatcttcgtacctcaaactcgatatatttaaacaagttaatgagatattaacgcgttttatgaatgatgatatataaccagaagttttatcctcggtggctagcgctataaccttatcattataataccaactagtgtgattaatatgtgacacgtcagtgtgggtacaaatatgtacattatcgtctacgtcgtattcgatacatccgcatacagccaacaaatataaaatgacaaatactctaacgccgttcgtacccatcttgatgcggtttaataaatgttttgatttcaatttattgtaaaaaaagattcggttttatactgttcgatattctcattgcttatattttcatctatcatctccacacagtcaaatccgtggttagcatgcacctcatcaaccggtaaaagactatcggactcttctatcattataactctagaatatttaatttggtcattattaatcaagtcaattatcttatttttaacaaacgtgagtattttactcattttttataaaaacttttagaaatatacagactctatcgtgtgtctatatcttctttttatatccaatgtatttatgtctgatttttcttcatttatcatatataatggtccaaattctacacgtgcttcggattcatccagatcattaaggttcttataattgtaacatccttctcttccctcttctacatcttccttcttattcttattcttagcgtcacagaatctaccacagcaggatcccatgacgagcgtcatattaaactaatccattttcaattataatatatgattagtaatgaccattaaaataaaaaatattcttcataaccggcaagaaagtgaaaagttcacattgaaactatgtcagtagtatacatcatgaaatgatgatatatatatactctattttggtggaggattatatgatataattcgtggataatcatttttaagacacatttctttattcgtaaatcttttcacgttaaatgagtgtccatattttgcaatttcttcatatgatggcggtgtacgtggacgaggctgctcctgttcttgttgtggtcgccgactgtcgtgtctgcgtttagatccctccattatcgcgattgcgtagatggagtactattttataccttgtaattaaatttttttattaattaaacgtataaaaacgttccgtatctgtatttaagagccagatttcgtctaatagaacaaatagctacagtaaaaataactagaataattgctacacccactagaaaccacggatcgtaatacggcaatcggttttcgataataggtggaacgtatattttatttaaggacttaacaattgtctgtaaaccacaatttgcttccgcggatcctgtattaactatctgtaaaagcatatgttgaccgggcggagccgaacattctccgatatctaatttctgtatatctataatattattaacctccgcatacgcattacagttcttttctagcttggataccgcactaggtacatcgtctagatctattcctatttcctcagcgatagctcttctatccttttccggaagcaatgaaatcacttcaataaatgattcaaccatgagtgtgaaactaagtcgagaattactcatgcatttgttagttattcggagcgcgcaatttttaaactgtcctataacctctcctatatgaatagcacaagtgacattagtagggatagaatgttgagctaatttttgtaaataactatctataaaaagattatacaaagttttaaactctttagtttccgccatttatccagtctgagaaaatgtctctcataataaatttttccaagaaactaattgggtgaagaatggaaacctttaatctatatttatcacagtctgttttggtacacatgatgaattcttccaatgccgtactaaattcgatatctttttcgatttctggatatgtttttaataaagtatgaacaaagaaatggaaatcgtaataccagttatgtttaactttgaaattgttttttattttcttgttaatgattccagccacttgggaaaagtcaaagtcgtttaatgccgatttaatacgttcattaaaaacaaactttttatcctttagatgaattattattggttcattggaatcaaaaagtaagatattatcgggtttaagatctgcgtgtaaaaagttgtcgcaacagggtagttcgtagattttaatgtataacagagccatctgtaaaaagataaactttatgtattgtaccaaagatttaaatcctaatttgatagctaactcggtatctactttatctgccgaatacagtgctaggggaaaaattataatgtttcctctttcatattcgtagttagttctcttttcatgttcgaaaaagtgaaacatgcggttaaaatagtttataacattaatattactgttaataactgccggataaaagtgggatagtaatttcacgaatttgatactgtcctttctctcgttaaacgcctttaaaaaaactttagaagaatatctcaatgagagttcctgaccatccatagtttgtatcaataatagcaacatatgaagaacacgtttatacagagtatgtaaaaatgttaatttatagtttaatcccatggcccacgcacacacgattaattttttttcatctccctttagattgttgtatagaaatttgggtactgtgaactccgccgtagtttccatgggactatataattttgtggcctcgaatacaaattttactacatagttatctatcttaaagactataccatatcctcctgtagatatgtgataaaaatcgtcgtttataggataaaatcgtttatccttttgttggaaaaaggatgaattaatgtaatcattctcttctatctttagtagtgtttccttattaaaattcttaaaataatttaacaatctaactgacggagcccaattttggtgtaaatctaattgggacattatattgttaaaatacaaacagtctcctaatataacagtatctgataatctatggggagacatccattgatattcaggggatgaatcattggcaacacccatttattgtacaaaaagccccaatttacaaacgaaagtccaggtttgatagagacaaacaattaactattttgtctctgtttttaacacctccacagtttttaatttctttagtaatgaaattattcacaatatcagtatcttctttatctaccagagattttactaacttgataaccttggctgtctcattcaatagggtagtaatatttgtatgtgtgatattgatatctttttgaattgtttcttttagaagtgattctttgatggtgccagcatacgaattacaataatgcagaaactcggttaacatgcaggaattatagtaagccaattccaattgttgcctgtgttgtattagagtgtcaatatgagcaatggtgtccttgcgtttctctgatagaatgcgagcagcgattttggcgttatcatttgacgatatttctggaatgacgaatcctgtttctactaactttttggtaggacaaagtgaaacaatcaagaagatagcttctcctcctatttgtggaagaaattgaactcctctagatgatctactgacgatagtatctccttgacagatattggaccgaattacagaagtacctggaatgtaaagccctgaaaccccctcattttttaagcagattgttgccgtaaatcctgcactatgcccaagatagagagctcctttggtgaatccatctctatgtttcagtttaaccaagaaacagtcagctggtctaaaatttccatctctatctaatacagcatctaacttgatgtcaggaactatgaccggtttaatgttatatgtaacattgagtaaatccttaagttcataatcatcactgtcatcagttatgtacgatccaaacaatgtttctaccggcatagtggatacgaagatgctatccatcagaatgtttccctgattagtattttctatatagctattcttctttaaacgattttccaaatcagtaactatgttcatttttttaggagtaggacgcctagccagtatggaagaggattttctagatcctctcttcaacatctttgatctcgatggaatgcaaaaccccatagtgaaacaaccaacgataaaaataatattgtttttcactttttataattttaccatctgactcatggattcattaatatctttataagagctactaacgtataattctttataactgaactgagatatatacaccggatctatggtttccataattgagtaaatgaatgctcggcaataactaatggcaaatgtatagaacaacgaaattatactagagttgttaaagttaatattttctatgagctgttccaataaattatttgttgtgactgcgttcaagtcataaatcatcttgatactatccagtaaaccgtttttaagttctggaatattatcatcccattgtaaagcccctaattcgactatcgaatatcctgctctgatagcagtttcaatatcgacggacgtcaatactgtaataaaggtggtagtattgtcatcatcgtgataaactacgggaatatggtcgttagtaggtacggtaactttacacaacgcgatatataactttccttttgtaccatttttaacgtagttgggacgtcctgcagggtattgttttgaagaaatgatatcgagaacagatttgatacgatatttgttggattcctgattattcactataatataatctagacagatagatgattcgataaatagagaaggtatatcgttggtaggataatacatccccattccagtattctcggatactctattgatgacactagttaagaacatgtcttctattctagaaaacgaaaacatcctacatggactcattaaaacttctaacgctcctgattgtgtctcgaatgcctcgtacaaggatttcaaggatgccatagattctttgaccaacgatttagaattgcgtttagcatctgatttttttattaaatcgaatggtcggctctctggtttgctaccccaatgataacaatagtcttgtaaagataaaccgcaagaaaatttatacgcatccatccaaataaccctagcaccatcggatgatattaatgtattattatagattttccatccacaattattgggccagtatactgttagcaacggtatatcgaatagattactcatgtaacctactagaatgatagttcgtgtactagtcataatatctttaatccaatctaaaaaatttaaaattagattttttacactgttaaagttaacaaaagtattacccgggtacgtggatatcatatatggcattggtccattatcagtaatagctccataaactgatacggcgatggtttttatatgtgtttgatctaacgaggaagaaattcgcgcccacaattcatctctagatatgtatttaatatcaaacggtaacacatcaatttcgggacgcgtatatgtttctaaatttttaatccaaatataatgatgacctatatgccctattatcatactgtcaactatagtacacctagggaacttacgatacatctgtttcctataatcgttaaattttacaaatctataacatgctaaaccttttgacgacagccattcattaatttctgatatggaatctgtattctcgataccgtatcgttctaaagccagtgctatatctccctgttcgtgggaacgctttcgtataatatcgatcaacggataatctgaagtttttggagaataatatgactcatgatctatttcgtccataaacaatctagacataggaattggaggcgatgatcttaattttgtgcaatgagtcgtcaatcctataacttctaatcttgtaatattcatcatcgacataatactatctatgttatcatcgtatattagtataccatgaccttcttcatttcgtgccaaaatgatatacagtcttaaatagttacgcaatatctcaatagtttcataattgttagctgttttcatcaaggtttgtatcctgtttaacatgatggcgttctataacgtctctattttctatttttaattttttaaatttttaacgatttactgtggctagatacccaatctctctcaaatatttttttagcctcgcttacaagctgtttatctatactattaaaactgacgaatccgtgattttggtaatgggttccgtcgaaatttgccgaagtgatatgaacatattcgtcgtcgactatcaacaattttgtattattctgaatagtgaaaaccttcacagatagatcattttgaacacacaacgcatctagacttttggcggttgccatagaatatacgtcgttcttatcccaattaccaactagaagtctgatcttaactcctctattaatggctgcttctataatggagttgtaaatgtcgggccaatagtagctattaccgtcgacacgtgtagtgggaactatggccaaatgttcaatatctatactagtcttagctgacctgagtttatcaataactacatcggtatctagatctctagaatatcccaataggtgttccggagaatcagtaaagaacactccacctataggattcttaatatgatacgcagtgctaactggcaaacaacaagccgcagagcataaattcaaccatgaattttttgcgctattaaaggctttaaaagtatcaaatcttctacgaagatctgtggccagcgggggataatcagaatatacacctaacgttttaatcgtatgtatagatcctccagtaaatgacgcgtttcctacataacatctttcatcatctgacacccaaaaacaaccgagtagtagtcccacattattttttttatctatattaacggttataaaatttatatccgggcagtgactttgtagctctcccagatttcttttccctcgttcatctagcaaaactattattttaatccctttttcagatgcctcttttagtttatcaaaaataagcgctcccctagtcgtactcagaggattacaacaaaaagatgctatgtatatatatttcttagctagagtgataatttcgttaaaacattcaaatgttgttaaatgatcggatctaaaatccatattttctggtagtgtttctaccagcctacattttgctcccgcaggtaccgatgcaaatggccacatttagttaacataaaaacttatacatcctgttctatcaacgattctagaatatcatcggctatatcgctaaaattttcatcaaagtcgacatcacaacctaactcagtcaatatattaagaagttccatgatgtcatcttcgtctatttctatatccgtatccattgtagattgttgaccgattatcgagtttaaatcattactaatactcaatccttcagaatacaatctgtgtttcattgtaaatttataggcggtgtatttaagttggtagattttcaattatgtattaatatagcaacagtagttcttgctcctccttgattctagcatcctcttcattattttcttctacgtacataaacatgtccaatacgttagacaacacaccgacgatggcggccgcagatctcgagttatgatctacttccttaccgtgcaataaattagaatatattttctacttttacgagaaattaattattgtatttattatttatgggtgaaaaacttactataaaaagcgggtgggtttggaattagtgaaagcttaaaaattgaaattttattttttttttttggaatataaataagctcgaagtcgacagatctaggcctggtaccaggaggaggaattcagcttaaagatgacttcgaaagtttatgatccagaacaaaggaaacggatgataactggtccgcagtggtgggccagatgtaaacaaatgaatgttcttgattcatttattaattattatgattcagaaaaacatgcagaaaatgctgttatttttttacatggtaacgcggcctcttcttatttatggcgacatgttgtgccacatattgagccagtagcgcggtgtattataccagatcttattggtatgggcaaatcaggcaaatctggtaatggttcttataggttacttgatcattacaaatatcttactgcatggtttgaacttcttaatttaccaaagaagatcatttttgtcggccatgattggggtgcttgtttggcatttcattatagctatgagcatcaagataagatcaaagcaatagttcacgctgaaagtgtagtagatgtgattgaatcatgggatgaatggcctgatattgaagaagatattgcgttgatcaaatctgaagaaggagaaaaaatggttttggagaataacttcttcgtggaaaccatgttgccatcaaaaatcatgagaaagttagaaccagaagaatttgcagcatatcttgaaccattcaaagagaaaggtgaagttcgtcgtccaacattatcatggcctcgtgaaatcccgttagtaaaaggtggtaaacctgacgttgtacaaattgttaggaattataatgcttatctacgtgcaagtgatgatttaccaaaaatgtttattgaatcggatccaggattcttttccaatgctattgttgaaggcgccaagaagtttcctaatactgaatttgtcaaagtaaaaggtcttcatttttcgcaagaagatgcacctgatgaaatgggaaaatatatcaaatcgttcgttgagcgagttctcaaaaatgaacaagcggccgccgccaccatgagcaagggcgaggaactgttcactggcgtggtcccaattctcgtggaactggatggcgatgtgaatgggcacaaattttctgtcagcggagagggtgaaggtgatgccacatacggaaagctcaccctgaaattcatctgcaccactggaaagctccctgtgccatggccaacactggtcactaccttcacctatggcgtgcagtgcttttccagatacccagaccatatgaagcagcatgactttttcaagagcgccatgcccgagggctatgtgcaggagagaaccatctttttcaaagatgacgggaactacaagacccgcgctgaagtcaagttcgaaggtgacaccctggtgaatagaatcgagctgaagggcattgactttaaggaggatggaaacattctcggccacaagctggaatacaactataactcccacaatgtgtacatcatggccgacaagcaaaagaatggcatcaaggtcaacttcaagatcagacacaacattgaggatggatccgtgcagctggccgaccattatcaacagaacactccaatcggcgacggccctgtgctcctcccagacaaccattacctgtccacccagtctgccctgtctaaagatcccaacgaaaagagagaccacatggtcctgctggagtttgtgaccgctgctgggatcacacatggcatggacgagctgtacaagtgagcggccgccctgctagcaagcttgctagcggccgctcgagatctgcggccgctacagacacgaatatgactaaaccgatgaccatttaaaaacccctctctagctttcacttaaactgtatcgatcattcttttagcacatgtataatataaaaacattattctatttcgaatttaggcttccaaaaatttttcatccgtaaaccgataataatatatatagacttgttaatagtcggaataaatagattaatgcttaaactatcatcatctccacgattagagatacaatatttacattctttttgctgtttcgaaactttatcaatacacgttaatacaaacccaggaaggagatattgaaactgaggctgttgaaaatgaaacggtgaatacaataattcagataatgtaaaatcatgattccgtattctgatgatattagaactgctaatggatgtcgatggtatgtatctaggagtatctattttaacaaagcatcgatttgctaatatacaattatccttttgattaattgttattttattcatattcttaaaaggtttcatatttatcaattcttctacattaaaaatttccatttttaatttatgtagccccgcaatactcctcattacgtttcattttttgtctataatatccattttgttcatctcggtacatagattatccaattgagaagcgcatttagtagttttgtacattttaagtttattgacgaatcgtcgaaaactagttatagttaacattttattatttgataccctgatattaatacccctgccgttactattatttataactgatgtaatccacgtaacattggaattaactatcgatagtaatgcatcgacgcttccaaaattgtctattataaactcaccgataatttttttattgcatgttttcatattcattaggattatcaaatctttaatcttattacgattgtatgcgttgatattacaagacgtcattctaaaagacggaggatctccatcaaatgccagacaatcacgtacaaagtacatggaaataggttttgttctattgcgcatcatagatttatatagaacacccgtagaaatactaatttgttttactctataaaatactaatgcatctatttcatcgttttgtataacgtctttccaagtgtcaaattccaaatttttttcattgatagtaccaaattcttctatctctttaactacttgcatagataggtaattacagtgatgcctacatgccgttttttgaaactgaatagatgcgtctagaagcgatgctacgctagtcacaatcaccactttcatatttagaatatatatatgtaaaaatatagtagaatttcattttgtttttttctatgctataaatgaattctcattttgcatctgctcatactccgttttatattaataccaaagaaggaagatatctggttctaaaagccgttaaagtatgcgatgttagaactgtagaatgcgaaggaagtaaagcttcctgcgtactcaaagtagataaaccctcatcgcccgcgtgtgagagaagaccttcgtccccgtccagatgcgagagaatgaataaccctggaaaacaagttccgtttatgaggacggacatgctacaaaatatgttcgcggctaatcgcgataatgtagcttctagacttttgtcctaaaatactattatatccttttcgatattaataaatccgtgtcgtccaggttttttatctctttcagtatgtgaatagataggtattttatctctattcatcatcgaatttaagagatccgataaacattgtttgtattctccagatgtcagcatctgatacaacaatatatgtgcacataaacctctggcacttatttcatgtaccttccccttatcactaaggagaatagtatttgagaaatatgtatacatgatattatcatgaattagatatacagaatttgtaacactctcgaaatcacacgatgtgtcggcgttaagatctaatatatcactcgataacacattttcatctagatacactagacattttttaaagctaaaatagtctttagtagtaacagtaactatgcgattattttcatcgatgatacatttcatcggcatattattacgcttaccatcaaagactataccatgtgtatatctaacgtattctagcatggttgccatacgcgcattaaacttttcaggatctttggatagatcttccaatctatctatttgagaaaacatttttatcatgttcaatagttgaaacgtcggatccactatatagatattatctataaagattttaggaactacgttcatggtatcctggcgaatattaaaactatcaatgatatgattatcgttttcatcttttatcaccatatagtttctaagatatgggattttacttaatataatattatttcccgtgataaattttattagaaaggccaaatctataagaaaagtcctagaattagtctgaagaatatctatatcgccgtatagtatatttggattaattagatatagagaatatgatccgtaacatatacaacttttattatggcgtctaagatattcttccatcaacttattaacatttttgactagggaagatacattatgacgtcccattacttttgccttgtctattactgcgacgttcatagaatttagcatatctcttgccaattcttccattgatgttacattataagaaattttagatgaaattacatttggagctttaatagtaagaactcctaatatgtccgtgtatgtggtcactaatacagattgtagttctataatcgtaaataatttacctatattatatgtttgagtctgtttagaaaagtagctaagtatacgatcttttatttctgatgcagatgtattaacatcggaaaaaaatctttttttattcttttttactaaagatacaaatatgtctttgttaaaaacagttattttctgaatatttctagcttgtaattttaacatatgatattcgttcacactaggtactctgcctaaataggtttctataatctttaatgtaatattaggaaaagtattctgatcaggattcctattcattttgaggatttaaaactctgattattgtctaatatggtctctacgcaaactttttcacagagcgatagagtttttgataactcgtttttcttaagaaatataaaactactgtctccagagctcgctctatcttttattttatctaattcgatacaaactcctgatactggttcagaaagtaattcattaattttcagtcctttatagaagatatttaatatagataatacaaaatcttcagtttttgatatcgatctgattgatcctagaactagatatattaataacgtgctcattaggcagtttatggcagcttgataattagatatagtatattccagttcatatttattagataccgcattgcccagattttgatattctatgaattcctctgaaaataaatccaaaataactagacattctattttttgtggattagtgtactctcttccctctatcatgttcactactggtgtccacgatgataaatatctagagggaatataatatagtccataggatgccaatctagcaatgtcgaataactgtaattttattcttcgctcttcattatgaattgattcttgaggtataaacctaacacaaattatattattagacttttcgtatgtaatgtctttcatgttataagtttttaatcctggaatagaatctattttaatgaggcttttaaacgcagagttctccaacgagtcaaagcataatactctgttgtttttcttatatacgatgttacgattttcttctttgaatggaataggtttttgaattagtttataattacaacataatagataaggaagtgtgcaaatagtacgcggaaaaaacataatagctcccctgttttcatccatggttttaagtaaatgatcactggcttctttagtcaatggatattcgaacattaaccgtttcatcatcattggacagaatccatatttcttaatgtaaagagtgatcaaatcattgtgtttattgtaccatcttgttgtaaatgtgtattcggttatcggatctgctcctttttctattaaagtatcgatgtcaatctcgtctaagaattcaactatatcgacatatttcatttgtatacacataaccattactaacgtagaatgtataggaagagatgtaacgggaacagggtttgttgattcgcaaactattctaatacataattcttctgttaatacgtcttgcacgtaatctattatagatgccaagatatctatataattattttgtaagatgatgttaactatgtgatctatataagtagtgtaataattcatgtattttgatatatgttccaactctgtctttgtgatgtctagtttcgtaatatctatagcatcctcaaaaaatatattcgcatatattcccaagtcttcagttctatcttctaaaaaatcttcaacgtatggaatataataatctattttacctcttctgatatcattaatgatatagtttttgacactatcttctgtcaattgattcttattcactatatctaagaaacggatagcgtccctaggacgaactactgccattaatatctctattatagcttctggacataattcatctattataccagaattaatgggaactattccgtatctatctaacatagttttaagaaagtcagaatctaagacttgatgttcatatattggttcatacatgaaatgatctctattgatgatagtgactatttcattctctgaaaattggtaactcattctatatatgctttccttgttgatgaaggatagaatatactcaatagaatttgtaccaacaaactgttctcttatgaatcgtatatcatcatctgaaataatcatgtaaggcatacatttaacaattagagacttgtctcctgttatcaatatactattcttgtgataatttatgtgtgaggcaaatttgtccacgttctttaattttgttatagtagatatcaaatccaatggagctacagttcttggcttaaacagatatagtttttctggaacaaattctacaacattattataaaggactttgggtagataagtgggatgaaatcctattttaattaatgcgatagccttgtcctcgtgcagatatccaaacgcttttgtgatagtatggcattcattgtctagaaacgctctacgaatatctgtgacagatatcatctttagagaatatactagtcgcgttaatagtactacaatttgtattttttaatctatctcaataaaaaaattaatatgtatgattcaatgtataactaaactactaactgttattgataactagaatcagaatctaatgatgacgtaaccaagaagtttatctactgccaatttagctgcattatttttagcatctcgtttagattttccatcggccttatcgaatactcttccgtcgatgtctacacaggcataaaatgtaggagagttactaggcccaactgattcaatacgaaaagaccaatctctcctagtaatttggcagtactcattaataacggtgacagggttagcatctttccaatcaataatttttttagccggaataacatcatcaaaagacttatgatcctctctcattgatttttcgcgggatacatcatctattatgacgtcagccatagcatcagcatccggcttatccgcctccgttgtcataaaccaacgaggaggaatatcgtcggagctgtacaccatagcactacgttgaagatcgtacagagctttattaacttctcgcttctccatattaagttgtctagttagttgtgcagcagtagctccttcgattccaatgtttttaatagccgcacacacaatctctgcgtcagaacgctcgtcaatatagatcttagacatttttagagagaactaacgcaaccagcaataaaactgaacctactttatcatttttttattcatcatcctctggtggttcgtcgttcctatcaaatgtagctctgattaacccgtcatctataggtgatgctggttctggagattctggaggagatggattattatctggaagaatctctgttatttccttgttttcatgtatcgattgcgttgtaacattaagattgcgaaatgctctaaatttgggaggcttaaagtgttgtttgcaatctctacacgcgtgtctaactagtggaggttcgtcagctgctctagtttgaatcatcatcggcgtagtattcctacttttacagttaggacacggtgtattgtatttctcgtcgagaacgttaaaataatcgttgtaactcacatcctttattttatctatattgtattctactcctttcttaatgcattttataccgaataagagatagcgaaggaattctttttcggtgccgctagtacccttaatcatatcacatagtgttttatattccaaatttgtggcaatagacggtttatttctatacgatagtttgtttctggaatcctttgagtattctataccaatattattctttgattcgaatttagtttcttcgatattagattttgtattacctatattcttgatgtagtactttgatgatttttccatggcccattctattaagtcttccaagttggcatcatccacatattgtgatagtaattctcggatatcagtagcggctaccgccattgatgtttgttcattggatgagtaactactaatgtatacattttccatttataacacttatgtattaactttgttcatttatattttttcattattatgttgatattaacaaaagtgaatatatatatgttaataattgtattgtggttatacggctacaattttataatgagtgaaagtcagtgtccgatgatcaatgacgatagctttactctgaaaagaaagtatcaaatcgatagtgcggagtcaacaataaaaatggataagaagaggataaagtttcagaatagagccaaaatggtaaaagaaataaatcagacaataagagcagcacaaactcattacgagacattgaaactaggatacataaaatttaagagaatgattatgactactactctagaagatatagcaccatctattccaaataatcagaaaacttataaactattctcggacatttcagccatcggcaaagcatcacagaatccgagtaagatggtatatgctctgctgctttacatgtttcccaatttgtttggagatgatcatagattcattcgttatagaatgcatccaatgagtaaaatcaaacacaagatcttctctcctttcaaacttaatcttattagaatattagtggaagaaagattctataataatgaatgcagatctaataaatggagaataattggaacacaagttgataaaatgttgatagctgaatctgataaatatacaatagatgcaaggtataacctaaaacccatgtatagaatcaagggagaatctgaagaagataccctctttatcaaacagatggtagaacaatgtgtgacatcccaggaattggtggaaaaagtgttgaagatactgtttagagatttgttcaagagtggagaatacaaagcgtacagatacgatgatgatgtagaaaatggatttattggattggatacactaaaattaaacattgttcatgatatagttgaaccatgtatgcctgttcgtaggccagtggctaagatactgtgtaaagaaatggtaaataaatactttgagaatccgctacatattattggtaaaaatcttcaagagtgcattgactttgttagtgaataggcatttcatctttctccaatactaattcaaattgttaaattaataatggatagtataaatagttattagttataagatagtaaaaataattattagaataagagtgtagtatcatagataactctcttctataaaaatggattttattcgtagaaagtatcttatatacacagtagaaaataatatagattttttaaaggatgatacattaagtaaagtaaacaattttaccctcaatcatgtactagctctcaagtatctagttagcaattttcctcaacacgttattactaaggatgtattagctaataccaatttttttgttttcatacatatggtacgatgttgtaaagtgtacgaagcggttttacgacacgcatttgatgcacccacgttgtacgttaaagcattgactaagaattatttatcgtttagtaacgcaatacaatcgtacaaggaaaccgtgcataaactaacacaagatgaaaaatttttagaggttgccgaatacatggacgaattaggagaacttataggcgtaaattatgacttagttcttaatccattatttcacggaggggaacccatcaaagatatggaaatcatttttttaaaactgtttaagaaaacagacttcaaagttgttaaaaaattaagtgttataagattacttatttgggcatacctaagcaagaaagatacaggcatagagtttgcggataatgatagacaaaatatatacactctatttcaacaaactggtagaatcgtccatagcaatctaacagaaacgtttagagattatatctttcccggagataagactagctattgggtgtggttaaacgaaagtatagctaatgatgcggatatcgttcttaatagacacgccattaccatgtatgataaaattcttagttatatatactctgagataaaacaaggacgcgttaataaaaacatgcttaagttagtttatatctttgagcctgaaaaagatatcagagaacttctgctagaaatcatatatgatattcctggagatatcctatctattattgatgcaaaaaacgacgattggaaaaaatattttattagtttttataaagctaattttattaacggtaatacatttattagtgatagaacgtttaacgaggacttattcagagttgttgttcaaatagatcccgaatatttcgataatgaacgaattatgtctttattctctacgagtgctgcggacattaaacgatttgatgagttagatattaataacagttatatatctaatataatttatgaggtgaacgatatcacattagatacaatggatgatatgaagaagtgtcaaatctttaacgaggatacgtcgtattatgttaaggaatacaatacatacctgtttttgcacgagtcggatcccatggtcatagagaacggaatactaaagaaactgtcatctataaaatccaagagtagacggctgaacttgtttagcaaaaacattttaaaatattatttagacggacaattggctcgtctaggtcttgtgttagatgattataaaggagacttgttagttaaaatgataaaccatcttaagtctgtggaggatgtatccgcattcgttcgattttctacagataaaaaccctagtattcttccatcgctaatcaaaactattttagctagttataatatttccatcatcgtcttatttcaaaggtttttgagagataatctatatcatgtagaagaattcttggataaaagcatccatctaaccaagacggataagaaatatatacttcaattgataagacacggtagatcatagaacagaccaaatatattattaataatttgtatatacatagatataattatcacacatttttgataaatgggaactgctgcaacaattcagactcccaccaaattaatgaataaagaaaatgcagaaatgattttggaaaaaattgttgatcatatagttatgtatattagtgacgaatcaagtgattcagaaaataatcctgaatatattgattttcgtaacagatacgaagactatagatctctcattataaaaagtgatcacgagtttgtaaagctatgtaaaaatcatgcggagaaaagttctccagaaacgcaacaaatgattatcaaacacatatacgaacaatatcttattccagtatctgaagtactattaaaacctataatgtccatgggtgacataattacatataacggatgtaaagacaatgaatggatgctagaacaactctctaccctaaactttaacaatctccgcacatggaactcatgtagcataggcaatgtaacgcgtctgttttatacattttttagttatctgatgaaagataaactaaatatataagtataatcccattctaatactttaacctgatgtattagcatcttattagaatattaacctaactaaaagacataacataaaaactcattacatagttgataaaaagcggtaggatataaatattatggctgccaccgttccgcgttttgacgacgtgtacaaaaatgcacaaagaagaattctagatcaagaaacattttttagtagaggtctaagtagaccgttaatgaaaaacacatatctatttgataattacgcgtatggatggataccagaaactgcaatttggagtagtagatacgcaaacctagatgctagtgactattatcccatttcgttgggattacttaaaaagttcgagtttctcatgtctctatataaaggtcctattcccgtatatgaagaaaaagtaaatactgaattcatagccaatggatcgttctctggtagatacgtatcatatcttcgaaagttttctgcccttccaacaaacgagtttattagttttttgttactgacttccattccaatctataatatcttgttctggtttaaaaacacacagtttgatattactaaacacacattattcagatacgtctatacagataatgccaaacacctggcgttggctaggtatatgcatcaaacaggagactataagcctttgtttagtcgtctcaaagagaattatatatttaccggtcccgttccaataagtatcaaagatatagatcaccctaatcttagtagagcaagaagtccatccgattatgagacattagctaatattagtactatattgtactttaccaagtatgatccggtattaatgtttttattgttttacgtacctgggtattcaattactacaaaaattactccagccgtagaatatctaatggataaactgaatctaacaaagagcgacgtacaactgttgtaaattattttatgcttcgtaaaatgtaggttttgaaccaaacattctttcaaagaatgagatgcataaaactttattatccaatagattgactatttcggacgtcaatcgtttaaagtaaacttcgtaaaatattctttgatcactgccgagtttaaaacttctatcgataattgtctcatatgttttaatatttacaagttttttggtccatggtacattagccggacaaatatatgcaaaataatatcgttctccaagttctatagtttctggattatttttattatattcagtaactaaatacatattagggttatctgcggatttataatttgagtgatgcattctactcaacataaataattctagaggagacgatctactatcaaattcggatcgtaaatctgtttctaaagaacggagaatatctatacatacctgattagaattcatccgtccttcagacaacatctcagacagtctggttttgtacatcttaatcatattcttatgaaacttggaaacatctcttctagtttcactagtacctttattaattctctcaggtacagattttgaattcgacgatgctgagtatttcatcgttgtatatttcttcttcgattgcataatcagattcttatataccgcctcaaactctattttaaaattattaaacaatactctattattaatcagtcgttctaactctttcgctatttctatagacttatctacatcttgactgtctatctctgtaaacacggagtcggtatctccatacacgctacgaaaacgaaatctgtaatctataggcaacgatgttttcacaatcggattaatatctctatcgtccatataaaatggattacttaatggattggcaaaccgtaacataccgttagataactctgctccatttagtaccgattctagatacaagatcattctacgtcctatggatgtgcaactcttagccgaagcgtatgagtatagagcactatttctaaatcccatcagaccatatactgagttggctactatcttgtacgtatattgcatggaatcatagatggccttttcagttgaactggtagcctgttttagcatctttttatatctggctctctctgccaaaaatgttcttaatagtctaggaatggttccttctatcgatctatcgaaaattgctatttcagagatgaggttcggtagtctaggttcacaatgaaccgtaatatatctaggaggtggatatttctgaagcaatagctgattatttatttcttcttccaatctattggtactaacaacgacaccgactaatgtttccggagatagatttccaaagatacacacattaggatacagactgttataatcaaagattaatacattattactaaacattttttgttttggagcaaataccttaccgccttcataaggaaacttttgttttgtttctgatctaactaagatagttttagtttccaacaatagctttaacagtggacccttgatgactgtactcgctctatattcgaataccatggattgaggaagcacatatgttgacgcacccgcgtctgtttttgtttctactccataatactcccacaaatactgacacaaacaagcatcatgaatacagtatctagccatatctaaagctatgtttagattataatccttatacatctgagctaaatcaacgtcatcctttccgaaagataatttatatgtatcattaggtaaagtaggacataatagtacgactttaaatccattttcccaaatatctttacgaattactttacatataatatcctcatcaacagtcacataattacctgtggttaaaacctttgcaaatgcagcggctttgcctttcgcgtctgtagtatcgtcaccgatgaacgtcatttctctaactcctctatttaatactttacccatgcaactgaacgcgttcttggatatagaatccaatttgtacgaatccaatttttcaaatttttgaatgaatgaatatagatcgaaaaatatagttccattattgttattaacgtgaaacgtagtattggccatgccgcctactcccttatgactagactgatttctctcataaatacagagatgtacagcttcctttttgtccggagatctaaagataattttctctcctgttaataactctagacgattagtaatatatctcagatcaaagttatgtccgttaaaggtaacgacgtagtcgaacgttagttccaacaattgtttagctattcgtaacaaaactatttcagaacatagaactagttctcgttcgtaatccatttccattagtgactgtatcctcaaacatcctctatcgacggcttcttgtatttcctgttccgttaacatctcttcattaatgagcgtaaacaataatcgtttaccacttaaatcgatataacagtaacttgtatgcgagattgggttaataaatacagaaggaaacttcttatcgaagtgacactctatatctagaaataagtacgatcttgggatatcgaatctaggtatttttttagcgaaacagttacgtggatcgtcacaatgataacatccattgttaatctttgtcaaatattgctcgtccaacgagtaacatccgtctggagatatcccgttagaaatataaaaccaactaatattgagaaattcatccatggtggcattttgtatgctgcgtttctttggctcttctatcaaccacatatctgcgacggagcattttctatctttaatatctagattataacttattgtctcgtcaatgtctatagttctcatctttcccaacggcctcgcattaaatggaggaggagacaatgactgatatatttcgtccgtcactacgtaataaaagtaatgaggaaatcgtataaatacggtctcgccatttcgacatctggatttcagatataaaaatctgttttcaccgtgactttcaaaccaattaatgcaccgaacatccatttatagaatttagaaatatattttcatttaaatgaatcccaaacattggggaagagccgtatggaccattatttttatagtactttcgcaagcgggtttagacggcaacatagaagcgtgtaaacgaaaactatatactatagttagcactcttccatgtcctgcatgtagacggcacgcgactatcgctatagaggacaataatgtcatgtctagcgatgatctgaattatatttattattttttcatcagattatttaacaatttggcatctgatcccaaatacgcgatcgatgtgacaaaggttaaccctttataaacttaacccattataaaacttatgattagtcacaactgaaataaccgcgtgattattttttggtataattctacacggcatggtttctgtgactatgaattcaacccccgttacattagtgaaatctttaacaaacagcaagggttcgtcaaagacataaaactcattgtttacaatcgaaatagaccccctatcacacttaaaataaaaaatatccttatcctttaccaccaaataaaattctgattggtcaatgtgaatgtattcacttaacagttccacaaatttatttattaactccgaggcacatacatcgtcggtattttttatggcaaactttactcttccagcatccgtttctaaaaaaatattaacgagttccatttatatcatccaatattattgaaatgacgttgatggacagatgatacaaataagaaggtacggtacctttgtccaccatctcctccaattcatgctctattttgtcattaactttaatgtatgaaaacagtacgccacatgcttccatgacagtgtgtaacactttggatacaaaatgtttgacattagtataattgtccaagactgtcaatctataatagatagtagctataatatattctatgatggtattgaagaagatgacaaccttggcatattgatcatttaacacagacatggtatcaacagatagcttgaatgaaagagaatcagtaattggaataagcgtcttctcgatagagtgtccgtataccaacatgtctgatattttgatgtattccattaaattatttagttttttctttttattctcgttaaacagcatttctgtcaacggaccccaacatcgttgaccgattaagttttgattgatttttccgtgtaaggcgtatctagtcagatcgtatagcctatccaataatccatcgtctgtgtgtagatcacatcgtacactttttaattctctatagaagagcgacagacatctggagcaattacagacagcaatttctttattctctacagatgtaagatacttgaagacattcctatgatgatgcagaattttggataacacggtattgatggtatctgttaccataattcctttgatggctgatagtgtcagagcacaagatttccaatctttgacaatttttagcaccattatctttgttttgatatctatatcagacagcatggtgcgtctgacaacacagggattaagacggaaagatgaaatgattctctcaacatcttcaatagataccttgctattttttctggcattatctatatgtgcgagaatatcctctagagaatcagtatcctttttgatgatagtggatctcaatgacatgggacgtttaaaccttcttattctatcaccagattgcatggtgatttgtcttctttcttttatcataatgtaatctctaaattcatcggcaaattgtctatatctaaaatcataatatgagatgtttacctctacaaatatctgttcgtccaatgttagagtatttacatcagttttgtattccaaattaaacatggcaacggatttaattttatattcctctattaagtcctcgtcgataataacagaatgtagataatcatttaatccgtcgtacatggttggaagatgcttgttgacaaaatctttaattgtcttgatgaaggtgggactatatctaacatcttgattaataaaatttataacattgtccataggatactttgtaactagttttatacacatctcttcatcggtaagtttagacagaatatcgtgaacaggtggtatattatattcatcagatatacgaagaacaatgtccaaatctatattgtttaatatattatatagatgtagcgtagctcctacaggaatatctttaactaagtcaatgatttcatcaaccgttagatctattttaaagttaatcatataggcattgatttttaaaaggtatgtagccttgactacattctcattaattaaccattccaagtcattgtgtgtaagaagattatattctatcataagcttgactacatttggtcccgataccattaaagaattcttatgatataaggaaacagattttaggtactcatctactctacaagaattttggagagccttaacgatatcagtgacgtttattatttcaggaggaaagaatctaacattgagaatatcggaattaatagcttccagatacagtgattttggcaatagtccgtgtaatccataatccagtaacacgagctggtgcttgctagacaccttttcaatgtttaatttttttgaaataagctttgataaagccttcctcgcaaattccggatacatgaacatgtcggcgacatgattaagtattgttttttcattatttttatattttctcaacaagttctcaataccccaatagatgatagaatatcacccaatgcgtccatgttgtctatttccaacaggtcgctatatccaccaatagaagtttttccaaaaaagattctaggaacagttctaccaccagtaatttgttcaaaataatcccgcaattcattttcgggtttaaattctttaatatcgacaatttcatacgctcctcttttgaaactaaacttatttagaatatccagtgcatttctacaaaaaggacatgtatacttgacaaaaattgtcactttgttattggccaacctttgttgtacaaattcctcggccattttaatatttaagtgatataaaactatctcgacttatttaactctttagtcgagatatatggacgcagatagctatatgatagccaactacagaaggcaaacgctataaaaaacataattacgacgagcatatttataaatatttttattcagcattacttgatatagtaatattaggcacagtcaaacattcaaccactctcgatacattaactctctcattttctttaacaaattctgcaatatcttcgtaaaaagattcttgaaactttttagaatatctatcgactctagatgaaatagcgttcgtcaacatactatgttttgtatacataaaggcgcccattttaacagtttctagtgacaaaatgctagcgatcctaggatcctttagaatcacatagattgacgattcgtctctcttagtaactctagtaaaataatcatacaatctagtacgcgaaataatattatccttgacttgaggagatctaaacaatctagttttgagaacatcgataagttcatcgggaatgacatacatactatctttaatagaactcttttcatccagttgaatggattcgtccttaaccaactgattaatgagatcttctattttatcattttccagatgatatgtatgtccattaaagttaaattgtgtagcgcttctttttagtctagcagccaatactttaacatcactaatatcgatatacaaaggagatgatttatctatggcattaagaattcgtttttcgacatccgtcaaaaccaattcctttttgcctgtatcatccagttttccatcctttgtaaagaaattattttctactagactattaataagactgataaggattcctccataattgcacaatccaaactttttaacaaaactagactttacgagatctacaggaatgcgtacttcaggttttttagcttgtgattttttcttttgcggacattttctagtaaccaactcatctaccatttcattgattttagcagtgaaataagctttcaatgcacgggcactgatactattgaaaacgagttgatcttcaaattccgccatttaagttcaccaaacaacttttaaatacaaatatatcaatagtagtagaataagaactataaaaaaaataataattaaccaaccccaacaaccggtattattagttgatgtggtagttttctcatcacttagaacagatttaacaatttctataaagtctgtcaaatcatcttccggagaccccataaatacaccaaatatagcggcgtacaacttatccatttatacattgaatattggcttttctttatcgctatcttcatcatattcatcatcaatatcaacaagtcccagattacgagccagatcttcttctacattttcagtcattgatacacgttcactatctccagagagtccgataacgttagccaccacttctctatcaatgattagtttcttgagcgcgaaagtaatttttgtttccgttccggatctatagaagacgataggtgtgataattgccttggccaattgtctttctcttttactgagtgattctagttcaccttctatagatctgagaatggatgattctccagtcgaaacatattctaccatggatccgtttaatttgttgatgaagatggattcatccttaaatgttttctctgtaatagtttccaccgaaagactatgcaaagaatttggaatgcgttccttgtgcttaatgtttccatagacggcttctagaagttgatacaacataggactagccgcggtaacttttatttttagaaagtatccatcgcttctatcttgtttagatttatttttataaagtttagtctctccttccaacataataaaagtggaagtcatttgactagataaactatcagtaagttttatagagatagacgaacaattagcgtattgagaagcatttagtgtaacgtattcgatacattttgcattagatttactaatcgattttgcatactctataacacccgcacaagtctgtagagaatcgctagatgcagtaggtcttggtgaagtttcaactctcttcttgattaccttactcatgattaaacctaaataattgtactttgtaatataatgatatatattttcactttatctcatttgagaataaaaatgtttttgtttaaccactgcatgatgtacagatttcggaatcgcaaaccaccagtggttttattttatccttgtccaatgtgaattgaatgggagcggatgcgggtttcgtacgtagatagtacattcccgtttttagaccgagactccatccgtaaaaatgcatactcgttagtttggaataactcggatctgctatatggatattcatagattgactttgatcgatgaaggctcccctgtctgcagccatttttatgatcgtcttttgtggaatttcccaaatagttttataaactcgcttaatatcttctggaaggtttgtattctgaatggatccaccatctgccataatcctattcttgatctcatcattccataattttctctcggttaaaactctaaggagatgcggattaactacttgaaattctccagacaatactctccgagtgtaaatattactggtatacggttccaccgactcattatttcccaaaatttgagcagttgatgcagtcggcataggtgccaccaataaactatttctaagaccgtatgttctgattttatcttttagaggttcccaattccaaagatccgacggtacaacattccaaagatcatattgtagaataccgttactggcgtacgatcctacatatgtatcgtatggtccttccttctcagctagttcacaactcgcctctaatgcaccgtaataaatggtttcgaagatcttcttatttagatcttgtgcttccaggctatcaaatggataatttaagagaataaacgcgtccgctaatccttgaacaccaataccgataggtctatgtctcttattagagatttcagcttctggaataggataataattaatatctataattttattgagatttctgacaattactttgaccacatccttcagtttgagaaaatcaaatcgcccatctattacaaacatgttcaaggcaacagatgccagattacaaacggctacctcattagcatccgcatattgtattatctcagtgcaaagattactacacttgatagttcctaaattttgttgattactctttttgttacacgcatccttataaagaatgaatggagtaccagtttcaatctgagattctataatcgctttccagacgactcgagcctttattatagatttgtatctcctttctctttcgtatagtgtatacaatcgttcgaactcgtctccccaaacattgtccaatccaggacattcatccggacacatcaacgaccactctccgtcatccttcactcgtttcataaagagatcaggaatccaaagagctataaatagatctctggttctatgttcctcgtttcctgtattctttttaagatcgaggaacgccataatatcagaatgccacggttccaagtatatggccataactccaggccgtttgtttcctccctgatctatgtatctagcggtgttattataaactctcaacattggaataataccgtttgatataccattggtaccggagatatagcttccactggcacgaatattactaattgatagacctattccccctgccattttagagattaatgcgcatcgttttaacgtgtcatagataccctctatgctatcatcgatcatgttaagtagaaaacagctagacatttggtgacgactagttcccgcattaaataaggtaggagaagcgtgcgtaaaccatttttcagaaagtagattgtacgtctcaatagctgagtctatatcccattgatgaattcctactgcgacacgcattaacatgtgctgaggtctttcaacgatcttgttgtttattttcaacaagtaggatttttccaaagttttaaaaccaaaatagttgtatgaaaagtctcgttcgtaaataataaccgagttgagtttatccttatatttgttaactatatccatggtgatacttgaaataatcggagaatgtttcccatttttaggattaacatagttgaataaatcctccatcacttcactaaatagtttttttgtttccttgtgtagatttgatacggctattctggcggctagaatggcataatccggatgttgtgtagtacaagtggctgctatttcggctgccagagtgtccaattctaccgttgttactccattatatattccttgaataaccttcatagctattttaataggatctatatgatccgtgtttaagccataacataattttctaatacgagacgtgattttatcaaacatgacattttccttgtatccatttcgtttaatgacaaacatttttgttggtgtaataaaaaaattatttaacttttcattaatagggatttgacgtatgtagcgtacaaaatgattgttcctggtatatagataaagagtcctatatatttgaaaatcgttacggctcgattaaactttaatgattgcatagtgaatatatcattaggatttaactccttgactatcatggcggcgccagaaattaccatcaaaagcattaatacagttataccgatcgcagttagaacggttatagcatccaccatttatatctaaaaattagatcaaagaatatgtgacaaagtcctagttgtatactgagaattgacgaaacaatgtttcttacatatttttttcttattagtaaccgacttaatagtaggaactggaaaactagacttgattattctataagtatagatacccttccaaataatattctctttgataaaagttccagaaaatgtagaattttttaaaaagttatcttttgctattaccaagattgtgtttagacgcttattattaatatgagtgatgaaatccacaccgcctctagatatcgcctttatttccacattagatggtaaatccaatagtgaaactatctttttaggaatgtatggactcgcgtttagaggagtaaacgtcttaggcgtcggaaaggatgattcatcaaacgaataaacaatttcacaaatggatgttaatgtattagtaggaaattttttgacgctattggaattgaagattctaatggatgatgttctacctatttcatccgataacatgttaatttccgacaccaacggttttaatatttcgatgatatacggtagtctctctttcggacttatatagcttattccacaatacgagtcattatatactccaaaaaacaaaataactagtataaaatctgtatcgaatgggaaaaacgaaattatcgacataggtatagaatccggaacattgaacgtattaatacttaattctttttctgtggtaagtaccgataggttattgacattgtatggttttaaatattctataacttgagacttgatagatattagtgatgaattgaaaattatttttatcaccacgtgtgtttcaggatcatcgtcgacgcccgtcaaccaaccgaacggagtaaaataaatatcattaatatatgctctagatattagtatttttatcaatcctttgattatcatcttctcgtaggcgaatgattccatgatcaagagtgatttaagaacatcctccggagtattaatgggcttagtaaacagtccatcgttgcaataataaaagttatccaagttaaaggatattatgcattcgtttaaagatatcacctcatctgacggagacaattttttggtaggttttagagactttgaagctacttgtttaacaaagttattcatcgtcgtctactattctatttaattttgtagttaatttatcacatatcacattaattgactttttggtccacttttccatacgtttatattcttttaatcctgcgttatccgtttccgttatatccagggatagatcttgcaagttaaatagaatgctcttaaataatgtcattttcttatccgctaaaaatttaaagaatgtataaacctttttcagagatttgaaactcttaggtggtgtcctagtacacaatatcataaacaaactaataaacattccacattcagattccaacagctgattaacttccacattaatacagcctattttcgctccaaatgtacattcgaaaaatctgaataaaacatcgatgtcacaatttgtattatccaatacagaatgtttgtgattcgtgttaaaaccatcggagaaggaatagaaataaaaattattatagtggtggaattcagttggaatattgcctccggagtcataaaaggatactaaacattgttttttatcataaattacacatttccaatgagacaaataacaaaatccaaacattacaaatctagaggtagaacttttaattttgtctttaagtatatacgataagatatgtttattcataaacgcgtcaaatttttcatgaatcgctaaggagtttaagaatctcatgtcaaattgtcctatataatccacttcggatccataagcaaactgagagactaagttcttaatacttcgattgctcatccaggctcctctctcaggctctattttcatcttgacgacctttggattttcaccagtatgtattcctttacgtgataaatcatcgattttcaaatccatttgtgagaagtctatcgccttagatactttttcccgtagtcgaggtttaaaaaaatacgctaacggtatactagtaggtaactcaaagacatcatatatagaatggtaacgcgtctttaactcgtcggttaactctttcttttgatcgagttcgtcgctactattgggtctgctcaggtgccccgactctactagttccaacatcataccgataggaatacaagacactttgccggcggttgtagatttatcatatttttccactacatatccgttacaatttgttaaaaatttagatacatctatattgctacataatccagctagtgaatatatatgacataataaattggtaaatcctagttctggtattttactaattactaaatctgtatatctttccatttatcatggaaaagaatttaccagatatcttcttttttccaaactgcgttaatgtattctcttacaaatattcacaagatgaattcagtaatatgagtaaaacggaacgtgatagtttctcattggccgtgtttccagttataaaacatagatggcataacgcacacgttgtaaaacataaaggaatatacaaagttagtacagaagcacgtggaaaaaaagtatctcctccatcactaggaaaacccgcacacataaacctaaccgcgaagcaatatatatacagtgaacacacaataagctttgaatgttatagttttctaaaatgtataacaaatacagaaatcaattcgttcgatgagtatatattaagaggactattagaagctggtaatagtttacagatattttccaattccgtaggtaaacgaacagatactataggtgtactagggaataagtatccatttagcaaaattccattggcctcattaactcctaaagcacaacgagagatattttcagcgtggatttctcatagacctgtagttttaactggaggaactggagtgggtaagacgtcacaggtacccaagttattgctttggtttaattatttatttggtggattctctactctagataaaatcactgactttcacgaaagaccagtcattctatctcttcctaggatagctttagttagattgcatagcaataccattttaaaatcattgggatttaaggtactagatggatctcctatttctttacggtacggatctataccggaagaattaataaacaaacaaccaaaaaaatatggaattgtattttctacccataagttatctctaacaaaactatttagttatggcactcttattatagacgaagttcatgagcatgatcaaataggagatattattatagcagtagcgagaaagcatcatacgaaaatagattctatgtttttaatgactgccacgttagaggatgacagggaacggctaaaagtatttttacctaatcccgcatttatacatattcctggagatacactgtttaaaattagcgaggtatttattcataataagataaatccatcttccagaatggcatacatagaagaagaaaagagaaatttagttactgctatacagatgtatactcctcctgatggatcatccggtatagtctttgtggcatccgttgcacagtgtcacgaatataaatcatatttagaaaaaagattaccgtatgatatgtatattattcatggtaaggtcttagatatagacgaaatattagaaaaagtgtattcatcacctaatgtatcgataattatttctactccttatttggaatccagcgttactatacgcaatgttacacacatttatgatatgggtagagtttttgtccccgctccttttggaggatcgcaacaatttatttctaaatctatgagagatcaacgaaaaggaagagtaggaagagttaatcctggtacatacgtctatttctatgatctgtcttatatgaagtctatacagcgaatagattcagaatttctacataattatatattgtacgctaataagtttaatctaacactccccgaagatttgtttataatccctacaaatttggatattctatggcgtacaaaggaatatatagactcgttcgatattagtacagaaacatggaataaattattatccaattattatatgaagatgatagagtatgctaaactttatgtactaagtcctattctcgctgaggagttggataactttgagaggacgggagaattaactagtattgtacgagaagccattttatctctaaatttacaaattaagattttaaattttaaacataaagatgatgatacgtatatacacttttgtaaaatattattcggtgtctataacggaacaaacgctactatatattatcatagacctctaacgggatatatgaatatgatttcagatactatatttgttcctgtagataataactaaaaatcaaactctaatgaccacatctttttttagagatgaaaaattttccacatctccttttgtagacacgactaaacattttgcagaaaaaagtttattagtgtttagataatcgtatacttcatcagtgtagatagtaaatgtgaacagataaaaggtattcttgctcaatagattggtaaattccatagaatatattaatcctttcttcttgagatcccacatcatttcaaccagagacgttttatccaatgatttacctcgtactataccacatacaaaactagattttgcagtgacgtcgtacctggtattcctaccaaacaaaattttacttttagttcttttagaaaattctaaggtagaatctctatttgccaatatgtcatctatggaattaccactagcaaaaaatgatagaaatatatattgatacatcgcagctggttttgatctactatactttaaaaacgaatcagattccataattgcctgtatatcatcagctgaaaaactatgttttacacgtattccttcggcatttctttttaatgatatatcttgtttagacaatgataaagttatcatgtccatgagagacgcgtctccgtatcgtataaatatttcattagatgttagacgcttcattaggggtatacttctataaggtttcttaatcagtccatcattggttgcgtcaagaactactatcggatgttgttgggtatctctagtgttacacatggccttactaaagtttgggtaaataactatgatatctctattaattatagatgcatatatttcattcgtcaaggatattagtatcgacttgctatcgtcattaatacgtgtaatgtaatcatataaatcatgcgatagccaaggaaaatttaaatagatgttcatcatataatcgtcgctataattcatattaatacgttgacattgactaatttgtaatatagcctcgccacgaagaaagctctcgtattcagtttcatcgataaaggataccgttaaatataactggttgccgatagtctcatagtctattaagtggtaagtttcgtacaaatacagaatccctaaaatattatctaatgttggattaatctttaccataactgtataaaatggagacggagtcataactattttaccgtttgtacttactggaatagatgaaggaataatctccggacatgctggtaaagacccaaatgtctgtttgaagaaatccaatgttccaggtcctaatctcttaacaaaaattacgatattcgatcccgatatcctttgcattctatttaccagcatatcacgaactatattaagattatctatcatgtctattctcccaccgttatataaatcgcctccgctaagaaacgttagtatatccatacaatggaatacttcatttctaaaatagtattcgttttctaattctttaatgtgaaatcgtatactagaaagggaaaaattatctttgagttttccgttagaaaagaaccacgaaactaatgttctgattgcgtccgattccgttgctgaattaatggatttacaccaaaaactcatataacttctagatgtagaagcattcgctaaaaaattagtagaatcaaaggatataagtagatgttccaacaagtgagcaattcccaagatttcatctatatcattctcgaatccgaaattagaaattcccaagtagatatcctttttcatccgatcgttgatgaaaatacgaactttattcggtaagacaatcatttactaaggagtaaaataggaagtaatgttcgtatgtcgttatcatcgtataaattaaaggtgtgttttttaccattaagtgacattataattttaccaatattggaattataatataggtgtatttgcgcactcgcgacggttgatgcatcggtaaatatagctgtatctaatgttctagtcggtatttcatcatttcgctgtctaataatagcgttttctctatctgtttccattacagctgcctgaagtttattggtcggataatatgtaaaataataagaaatacatacgaataacaaaaataaaataagatataataaagatgccatttagagatctaattttgtttaacttgtccaaattcctacttacagaagatgaggaatcgttggagatagtgtcttccttatgtagaggatttgaaatatcttataatgacttgataacttactttccagataggaaataccataaatatatttataaagtatttgaacatgtagatttatcggaggaattaagtatggaattccatgatacaactctgagagatttagtctatcttagattgtacaagtattccaagtgtatacggccgtgttataaattaggagataatctaaaaggcatagttgttataaaggacaggaatatttatattagggaagcaaatgatgacttgatagaatatctcctcaaggaatacactcctcagatttatacatattctaatgagcgcgtccccataactggttcaaaattaattctttgtggattttctcaagttacatttatggcgtatacaacgtcgcatataacaacaaataaaaaggtagatgttctcgtttccaaaaaatgtatagatgaactagtcgatccaataaattatcaaatacttcaaaatttatttgataaaggaagcggaacaataaacaaaatactcaggaagatattttattcggtaacaggtggccaaactccataggtagctttttctatttcggattttagaatttccaaattcaccagcgatttatcggttttggtgaaatccaaggatttattaatgtccacaaatgccatttgttttgtctgtggattgtatttgaaaatggaaacgatgtagttagatagatgcgctgcgaagtttcctattagggttccgcgcttcacgtcacccagcatacttgaatcaccatcctttaaaaaaaatgataagatatcaacatggagtatatcatactcgaattttaattcttctactgactcactgacattttcacaaatactacaatacggtttaccgaaaataatcagtacgttcttcatttatgggtatcaaaaacttaaaatcgttactgctggaaaataaatcactgacgatattagatgataatttatacaaagtatacaatggaatatttgtggatacaatgagtatttatatagccgtcgccaattgtgtcagaaacttagaagagttaactacggtattcataaaatacgtaaacggatgggtaaaaaagggagggcatgtaaccctttttatcgatagaggaagtataaaaattaaacaagacgttagagacaagagacgtaaatattctaaattaaccaaggacagaaaaatgttagaattagaaaagtgtacatccgaaatacaaaatgttaccggatttatggaagaagaaataaaggcagaaatgcaattaaaaatcgataaactcacatttcaaatatatttatctgattctgataacataaaaatatcattgaatgagatactaacacatttcaacaataatgagaatgttacattattttattgtgatgaacgagacgcagaattcgttatgtgtctcgaggctaaaacacatttctctaccacaggagaatggccgttgataataagtaccgatcaggatactatgctatttgcatctgctgataatcatcctaagatgataaaaaacttaactcaactgtttaaatttgttccctcggcagaggataactatttagcaaaattaacggcgttagtgaatggatgtgatttctttcctggactctatggggcatctataacacccaccaacttaaacaaaatacaattgtttagtgattttacaatcgataatatagtcactagtttggcaattaaaaattattatagaaagactaactctaccgtagacgtgcgtaatattgttacgtttataaacgattacgctaatttagacgatgtctactcgtatattcctccttgtcaatgcactgttcaagaatttatattttccgcattagatgaaaaatggaatgaatttaaatcatcttatttagaaagcgtgccgttaccctgccaattaatgtacgcgttagaaccacgcaaggagattgatgtttcagaagttaaaactttatcatcttatatagatttcgaaaatactaaatcagatatcgatgttataaaatctatatcctcgatcttcggatattctaacgaaaactgtaacacgatagtattcggcatctataaggataatttactactgagtataaataattcattttactttaacgatagtctgttaataaccaatactaaaagtgataatataataaatataggttactagattaaaaatggtgttccaactcgtgtgctctacatgcggtaaagatatttctcacgaacgatataaattgattatacgaaaaaaatcattaaaggatgtactcgtcagtgtaaagaacgaatgttgtaggttaaaattatctacacaaatagaacctcaacgtaacttaacagtgcaacctctattggatataaactaatatggatccggttaattttatcaagacatatgcgcctagaggttctattatttttattaattataccatgtcattaacaagtcatttgaatccatcgatagaaaaacatgtgggtatttattatggtacgttattatcggaacacttggtagttgaatctacctatagaaaaggagttcgaatagtcccattggatagtttttttgaaggatatcttagtgcaaaagtatacatgttagagaatattcaagttatgaaaatagcagctgatacgtcattaactttattgggtattccgtatggatttggtcatgatagaatgtattgttttaaattggtagctgactgttataaaaatgccggtattgatacatcgtctaaacgaatattgggcaaagatatttttctgagccaaaacttcacagacgataatagatggataaagatatatgattctaataatttaacattttggcaaattgattaccttaaagggtgagttaatatgcataactactcctccgttgttttttccctcgttctttttcttaacgttgtttgccatcactctcataatgtaaagatattctaaaatggtaaacttttgcatatcggacgcagaaattggtataaatgttgtaattgtattatttcccgtcaatggactagtcacagctccatcagttttatatcctttagagtatttctcactcgtgtctaacattctagagcattccatgatctgtttatcgttgatattggccggaaagatagattttttattttttattatattactattggcaattgtagatataacttctggtaaatatttttctaccttttcaatctcttctattttcaagccggctatatattctgctatattgttgctagtatcaataccttttctggctaagaagtcatatgtggtattcactatatcagttttaactggtagttccattagcctttccacttctgcagaataatcagaaattggttctttaccagaaaatccagctactataataggctcaccgatgatcattggcaaaatcctatattgtaccagattaatgagagcatatttcatttccaataattctgctagttcttgagacattgatttatttgatgaatctagttggttctctagatactctaccatttctgccgcatacaataacttgttagataaaatcagggttatcaaagtgtttagcgtggctagaatagtgggcttgcatgtattaaagaatgcggtagtatgagtaaaccgttttaacgaattatatagtctccagaaatctgtggcgttacatacatgagccgaatgacatcgaagattgtccaatatttttaatagctgctctttgtccattatttctatatttgactcgcaacaattgtagataccattaatcaccgattcctttttcgatgccggacaatagcacaattgtttagctttggactctatgtattcagaattaatagatatatctctcaatacagattgcactatacattttgaaactatgtcaaaaattgtagaacgacgctgttctgcagccatttaactttaaataatttacaaaaatttaaaatgagcatccgtataaaaatcgataaactgcgccaaattgtggcatatttttcagagttcagtgaagaagtgtctataaatgtagactcgacggatgagttaatgtatatttttgccgccttgggcggatctgtaaacatttgggcaattatacctctaagtgcatcagtgttttaccgaggagccgaaaatattgtgtttaatcttcctgtgtccaaggtaaaatcgtgtttgtgtagttttcacaatgatgccatcatagatatagaacctgatctggaaaataatctagtaaaactttctagttatcatgtagtaagtgtcgattgtaacaaggaactgatgcctattaggacagatactactatttgtctaagtatagatcaaaagaaatcttacgtgtttaattttcacaagtatgaagaaaaatgttgtggtagaaccgtcattcatctagaatggttgttgggctttatcaagtgtattagtcagcatcagcatctggctattatgtttaaagatgacaatattattatgaagactcctggtaatactgatgcgttttccagggaatattctatgactgaatgttctcaagaactacaaaagttttctttcaaaatagctatctcgtctctcaacaaactacgaggattcaaaaagagagtcaatgtttttgaaactagaatcgtaatggataatgacgataacattttaggaatgttgttttcggatagagttcaatcctttaagatcaacatctttatggcgtttttagattaatactttcaatgagataaatatgggtggcggagtaagtgttgagctccctaaacgggatccgcctccgggagtacccactgatgagatgttattaaacgtggataaaatgcatgacgtgatagctcccgctaagcttttagaatatgtgcatataggaccactagcaaaagataaagaggataaagtaaagaaaagatatccagagtttagattagtcaacacaggacccggtggtctttcggcattgttaagacaatcgtataatggaaccgcacccaattgctgtcgcacttttaatcgtactcattattggaagaaggatggaaagatatcagataagtatgaagagggtgcagtattagaatcgtgttggccagacgttcacgacactggaaaatgcgatgttgatttattcgactggtgtcagggggatacgttcgatagaaacatatgccatcagtggatcggttcagcctttaataggagtaatagaactgtagagggtcaacaatcgttaataaatctgtataataagatgcaaacattatgtagtaaagatgctagtgtaccaatatgcgaatcatttttgcattatttacgcgcacacaatacagaagatagcaaagagatgatcgattatattctaagacaacagtctgcggactttaaacagaaatatatgagatgtagttatcccactagagataagttagaagagtcattaaaatatgcggaacctcgagaatgttgggatccagagtgttcgaatgccaatgttaatttcttactaacacgtaattataataatttaggactttgcaatattgtacgatgtaataccagcgtgaacaacttacagatggataaaacttcctcattaagattgtcatgtggattaagcaatagtgatagattttctactgttcccgtcaatagagcaaaagtagttcaacataatattaaacactcgttcgacctaaaattgcatttgatcagtttattatctctcttggtaatatggatactaattgtagctatttaaatgggtgccgcggcaagcatacagacgacggtgaatacactcagcgaacgtatctcgtctaaattagaacaagaagcgaacgctagtgctcaaacaaaatgtgatatagaaatcggaaatttttatatccgacaaaaccatggatgtaacctcactgttaaaaatatgtgctctgcggacgcggatgctcagttggatgctgtgttatcagccgctacagaaacatatagtggattaacaccggaacaaaaagcatacgtgccagctatgtttactgctgcgttaaacattcagacgagtgtaaacactgttgttagagattttgaaaattatgtgaaacagacttgtaattctagcgcggtcgtcgataacaaattaaagatacaaaacgtaatcatagatgaatgttacggagccccaggatctccaacaaatttggaatttattaatacaggatctagcaaaggaaattgtgccattaaagcgttgatgcaattgacgactaaggccactactcaaatagcacctagacaagttgctggtacaggagttcagttttatatgattgttatcggtgttataatattggcagcgttgtttatgtactatgccaagcgtatgttgttcacatccaccaatgataaaatcaaacttattttagccaataaggaaaacgtccattggactacttacatggacacattctttagaacttctccgatggttattgctaccacggatatgcaaaactgaaaatatattgataatattttaatagattaacatggaagttatcgctgatcgtctagacgatatagtgaaacaaaatatagcggatgaaaaatttgtagattttgttatacacggtctagagcatcaatgtcctgctatacttcgaccattaattaggttgtttattgatatactattatttgttatagtaatttatatttttacggtacgtctagtaagtagaaattatcaaatgttgttggtggtgctagtcatcacattaactattttttattactttatactataatagtactagactgacttctaacaaacatctcacctgccataaataaatgcttgatattaaagtcttctatttctaacactattccatctgtggaaaataatactctgacattatcgctaattgacacatcggtgagtgatatgcctataaagtaataatcttctttgggcacatataccagtgtaccaggttctaacaacctatttactggtgctcctgtagcatactttttctttaccttgagaatatccatcgtttgcttggtcaatagcgatatgtgattttttatcaaccactcaaaaaagtaattggagtgttcatatcctctacgggctattgtctcatggccgtgtatgaaatttaagtaacacgactgtggtagatttgttctatagagccgattgccgcaaatagatagaactaccaatatgtctgtacaaatgttaaacattaattgattaacagaaaaaacaatgttcgttctgggaatagaaaccagatcaaaacaaaattcgttagaatatatgccacgtttatacatggaatataaaataactacagtttgaaaaataacagtatcatttaaacatttaacttgcggggttaatctcacaactttactgtttttgaactgttcaaaatatagcatcgatccgtgagaaatacgtttagccgcctttaatagaggaaatcccaccgcctttctggatctcaccaacgacgatagttctgaccagcaactcatttcttcatcatccacctgttttaacatataataggcaggagatagatatccgtcattgcaatattccttctcgtaggcacacaatctaatattgataaaatctccattctcttctctgcatttattatcttgtctcggtggctgattaggctgtggtcttggtttaggccttggtctatcgttgttgaatctattttggtcattaaatctttcatttcttcctggtatatttctatcacctcgtttggttggatttttgtctatattatcgtttgtaacatcggtacgggtattcatttatcacaaaaaaaacttctctaaatgagtctactgctagaaaacctcatcgaagaagataccatattttttgcaggaagtatatctgagtatgatgatttacaaatggttattgccggcgcaaaatccaaatttccaagatctatgctttctatttttaatatagtacctagaacgatgtcaaaatatgagttggagttgattcataacgaaaatatcacaggagcaatgtttaccacaatgtataatataagaaacaatttgggtctaggagatgataaactaactattgaagccattgaaaactatttcttggatcctaacaatgaagttatgcctcttattattaataatacggatatgactgccgtcattcctaaaaaaagtggtaggagaaagaataagaacatggttatcttccgtcaaggatcatcacctatcttgtgcattttcgaaactcgtaaaaagattaatatttataaagaaaatatggaatccgcgtcgactgagtatacacctatcggagacaacaaggctttgatatctaaatatgcgggaattaatgtcctgaatgtgtattctccttccacatccataagattgaatgccatttacggattcaccaataaaaataaactagagaaacttagtactaataaggaactagaatcgtatagttctagccctcttcaagaacccattaggttaaatgattttctgggactattggaatgtgttaaaaagaatattcctctaacagatattccgacaaaggattgattactataaatggagaatgttcctaatgtatactttaatcctgtgtttatagagcccacgtttaaacattctttattaagtgtttataaacacagattaatagttttatttgaagtattcgttgtattcattctaatatatgtattttttagatctgaattaaatatgttcttcatgcctaaacgaaaaatacccgatcctattgatagattacgacgtgctaatctagcgtgtgaagacgataaattaatgatctatggattaccatggatgacaactcaaacatctgcgttatcaataaatagtaaaccgatagtgtataaagattgtgcaaagcttttgcgatcaataaatggatcacaaccagtatctcttaacgatgttcttcgcagatgatgattcattttttaagtatttggctagtcaagatgatgaatcttcattatctgatatattgcaaatcactcaatatctagactttctgttattattattgatccaatcaaaaaataaattagaagctgtgggtcattgttatgaatctctttcagaggaatacagacaattgacaaaattcacagactttcaagattttaaaaaactgtttaacaaggtccctattgttacagatggaagggtcaaacttaataaaggatatttgttcgactttgtgattagtttgatgcgattcaaaaaagaatcctctctagctaccaccgcaatagatcctgttagatacatagatcctcgtcgcaatatcgcattttctaacgtgatggatatattaaagtcgaataaagtgaacaataattaattctttattgtcatcatgaacggcggacatattcagttgataatcggccccatgttttcaggtaaaagtacagaattaattagacgagttagacgttatcaaatagctcaatataaatgcgtgactataaaatattctaacgataatagatacggaacgggactatggacgcatgataagaataattttgaagcattggaagcaactaaactatgtgatgtcttggaatcaattacagatttctccgtgataggtatcgatgaaggacagttctttccagacattgttgaattagatcgataaaaattaattaattacccgggtaccaggcctagatctgtcgagatccggtggtggtgcaaatcaaagaactgctcctcagtggatgttgcctttacttctaggcctgtacggaagtgttacttctgctctaaaagctgctgcagggggggggggggggtgggggggccggttagggccgccatcccctcagagcgtcgggatatcgggtggcggctcgggacggaggacgcgctagtgttcttctgtgtggcagttcagaatgatggatcaagctagatcagcattctctaacttgtttggtggagaaccattgtcatatacccggttcagcctggctcggcaagtagatggcgataacagtcatgtggagatgaaacttgctgtagatgaagaagaaaatgctgacaataacacaaaggccaatgtcacaaaaccaaaaaggtgtagtggaagtatctgctatgggactattgctgtgatcgtctttttcttgattggatttatgattggctacttgggctattgtaaaggggtagaaccaaaaactgagtgtgagagactggcaggaaccgagtctccagtgagggaggagccaggagaggacttccctgcagcacgtcgcttatattgggatgacctgaagagaaagttgtcggagaaactggacagcacagacttcaccagcaccatcaagctgctgaatgaaaattcatatgtccctcgtgaggctggatctcaaaaagatgaaaatcttgcgttgtatgttgaaaatcaatttcgtgaatttaaactcagcaaagtctggcgtgatcaacattttgttaagattcaggtcaaagacagcgctcaaaactcggtgatcatagttgataagaacggtagacttgtttacctggtggagaatcctgggggttatgtggcgtatagtaaggctgcaacagttactggtaaactggtccatgctaattttggtactaaaaaagattttgaggatttatacactcctgtgaatggatctatagtgattgtcagagcagggaaaatcacctttgcagaaaaggttgcaaatgctgaaagcttaaatgcaattggtgtgttgatatacatggaccagactaaatttcccattgttaacgcagaactttcattctttggacatgctcatctggggacaggtgacccttacacacctggattcccttccttcaatcacactcagtttccaccatctcggtcatcaggattgcctaatatacctgtccagacaatctccagagctgctgcagaaaagctgtttgggaatatggaaggagactgtccctctgactggaaaacagactctacatgtaggatggtaacctcagaaagcaagaatgtgaagctcactgtgagcaatgtgctgaaagagataaaaattcttaacatctttggagttattaaaggctttgtagaaccagatcactatgttgtagttggggcccagagagatgcatggggccctggagctgcaaaatccggtgtaggcacagctctcctattgaaacttgcccagatgttctcagatatggtcttaaaagatgggtttcagcccagcagaagcattatctttgccagttggagtgctggagactttggatcggttggtgccactgaatggctagagggatacctttcgtccctgcatttaaaggctttcacttatattaatctggataaagcggttcttggtaccagcaacttcaaggtttctgccagcccactgttgtatacgcttattgagaaaacaatgcaaaatgtgaagcatccggttactgggcaatttctatatcaggacagcaactgggccagcaaagttgagaaactcactttagacaatgctgctttccctttccttgcatattctggaatcccagcagtttctttctgtttttgcgaggacacagattatccttatttgggtaccaccatggacacctataaggaactgattgagaggattcctgagttgaacaaagtggcacgagcagctgcagaggtcgctggtcagttcgtgattaaactaacccatgatgttgaattgaacctggactatgagaggtacaacagccaactgctttcatttgtgagggatctgaaccaatacagagcagacataaaggaaatgggcctgagtttacagtggctgtattctgctcgtggagacttcttccgtgctacttccagactaacaacagatttcgggaatgctgagaaaacagacagatttgtcatgaagaaactcaatgatcgtgtcatgagagtggagtatcacttcctctctccctacgtatctccaaaagagtctcctttccgacatgtcttctggggctccggctctcacacgctgccagctttactggagaacttgaaactgcgtaaacaaaataacggtgcttttaatgaaacgctgttcagaaaccagttggctctagctacttggactattcagggagctgcaaatgccctctctggtgacgtttgggacattgacaatgagttttaaatgtgatacccatagcttccatgagaacagcagggtagtctggtttctagacttgtgctgatcgtgctaaattttcagtagggctacaaaacctgatgttaaaattccatcccatcatcttggtactactagatgtctttaggcagcagcttttaatacagggtagataacctgtacttcaagttaaagtgaataaccacttaaaaaatgtccatgatggaatattcccctatctctagaattttaagtgctttgtaatgggaactgcctctttcctgttgttgttaatgaaaatgtcagaaaccagttatgtgaatgatctctctgaatcctaagggctggtctctgctgaaggttgtaagtggtcgcttactttgagtgatcctccaacttcatttgatgctaaataggagataccaggttgaaagaccttctccaaatgagatctaagcctttccataaggaatgtagctggtttcctcattcctgaaagaaacagttaactttcagaagagatgggcttgttttcttgccaatgaggtctgaaatggaggtccttctgctggataaaatgaggttcaactgttgattgcaggaataaggccttaatatgttaacctcagtgtcatttatgaaaagaggggaccagaagccaaagacttagtatattttcttttcctctgtcccttcccccataagcctccatttagttctttgttatttttgtttcttccaaagcacattgaaagagaaccagtttcaggtgtttagttgcagactcagtttgtcagactttaaagaataatatgctgccaaattttggccaaagtgttaatcttaggggagagctttctgtccttttggcactgagatatttattgtttatttatcagtgacagagttcactataaatggtgtttttttaatagaatataattatcggaagcagtgccttccataattatgacagttatactgtcggttttttttaaataaaagcagcatctgctaataaaacccaacagatactggaagttttgcatttatggtcaacacttaagggttttagaaaacagccgtcagccaaatgtaattgaataaagttgaagctaagatttagagatgaattaaatttaattaggggttgctaagaagcgagcactgaccagataagaatgctggttttcctaaatgcagtgaattgtgaccaagttataaatcaatgtcacttaaaggctgtggtagtactcctgcaaaattttatagctcagtttatccaaggtgtaactctaattcccattttgcaaaatttccagtacctttgtcacaatcctaacacattatcgggagcagtatcttccataatgtataaagaacaaggtagtttttacctaccacagtgtctgtatcggagacagtgatctccatatgttacactaagggtgtaagtaattatcgggaacagtgtttcccataattttcttcatgcaatgacatcttcaaagcttgaagatcgttagtatctaacatgtatcccaactcctataattccctatcttttagttttagttgcagaaacattttgtggtcattaagcattgggtgggtaaattcaaccactgtaaaatgaaattactacaaaatttgaaatttagcttgggtttttgttacctttatggtttctccaggtcctctacttaatgagatagtagcatacatttataatgtttgctattgacaagtcattttaactttatcacattatttgcatgttacctcctataaacttagtgcggacaagttttaatccagaattgaccttttgacttaaagcagagggactttgtatagaaggtttgggggctgtggggaaggagagtcccctgaaggtctgacacgtctgcctacccattcgtggtgatcaattaaatgtaggtatgaataagttcgaagctccgtgagtgaaccatcattataaacgtgatgatcagctgtttgtcatagggcagttggaaacggcctcctagggaaaagttcatagggtctcttcaggttcttagtgtcacttacctagatttacagcctcacttgaatgtgtcactactcacagtctctttaatcttcagttttatctttaatctcctcttttatcttggactgacatttagcgtagctaagtgaaaaggtcatagctgagattcctggttcgggtgttacgcacacgtacttaaatgaaagcatgtggcatgttcatcgtataacacaatatgaatacagggcatgcattttgcagcagtgagtctcttcagaaaacccttttctacagttagggttgagttacttcctatcaagccagtacgtgctaacaggctcaatattcctgaatgaaatatcagactagtgacaagctcctggtcttgagatgtcttctcgttaaggagatgggccttttggaggtaaaggataaaatgaatgagttctgtcatgattcactattctagaacttgcatgacctttactgtgttagctctttgaatgttcttgaaattttagactttctttgtaaacaaatgatatgtccttatcattgtataaaagctgttatgtgcaacagtgtggagattccttgtctgatttaataaaatacttaaacactgaaaaaaaaaaaaaaaaaaaaaaaaaaaaaaaaaaaaaaaaaaaaaaaaaaaaaaaaaaaaaaaaaaaaaaaaaaaaaaaaagtaccttctgaggcggaaagaaccagccggatctcgacttcgagcttatttatattccaaaaaaaaaaaataaaatttcaatttttaagctttcactaattccaaacccacccgctttttatagtaagtttttcacccataaataataaatacaataattaatttctcgtaaaagtagaaaatatattctaatttattgcacggtaaggaagtagatcataactcgagcatgggagatcccgtcgttttacaacgtcgtgactgggaaaaccctggcgttacccaacttaatcgccttgcagcacatccccctttcgccagctggcgtaatagcgaagaggcccgcaccgatcgcccttcccaacagttgcgcagcctgaatggcgaatggcgctttgcctggtttccggcaccagaagcggtgccggaaagctggctggagtgcgatcttcctgaggccgatactgtcgtcgtcccctcaaactggcagatgcacggttacgatgcgcccatctacaccaacgtgacctatcccattacggtcaatccgccgtttgttcccacggagaatccgacgggttgttactcgctcacatttaatgttgatgaaagctggctacaggaaggccagacgcgaattatttttgatggcgttaactcggcgtttcatctgtggtgcaacgggcgctgggtcggttacggccaggacagtcgtttgccgtctgaatttgacctgagcgcatttttacgcgccggagaaaaccgcctcgcggtgatggtgctgcgctggagtgacggcagttatctggaagatcaggatatgtggcggatgagcggcattttccgtgacgtctcgttgctgcataaaccgactacacaaatcagcgatttccatgttgccactcgctttaatgatgatttcagccgcgctgtactggaggctgaagttcagatgtgcggcgagttgcgtgactacctacgggtaacagtttctttatggcagggtgaaacgcaggtcgccagcggcaccgcgcctttcggcggtgaaattatcgatgagcgtggtggttatgccgatcgcgtcacactacgtctgaacgtcgaaaacccgaaactgtggagcgccgaaatcccgaatctctatcgtgcggtggttgaactgcacaccgccgacggcacgctgattgaagcagaagcctgcgatgtcggtttccgcgaggtgcggattgaaaatggtctgctgctgctgaacggcaagccgttgctgattcgaggcgttaaccgtcacgagcatcatcctctgcatggtcaggtcatggatgagcagacgatggtgcaggatatcctgctgatgaagcagaacaactttaacgccgtgcgctgttcgcattatccgaaccatccgctgtggtacacgctgtgcgaccgctacggcctgtatgtggtggatgaagccaatattgaaacccacggcatggtgccaatgaatcgtctgaccgatgatccgcgctggctaccggcgatgagcgaacgcgtaacgcgaatggtgcagcgcgatcgtaatcacccgagtgtgatcatctggtcgctggggaatgaatcaggccacggcgctaatcacgacgcgctgtatcgctggatcaaatctgtcgatccttcccgcccggtgcagtatgaaggcggcggagccgacaccacggccaccgatattatttgcccgatgtacgcgcgcgtggatgaagaccagcccttcccggctgtgccgaaatggtccatcaaaaaatggctttcgctacctggagagacgcgcccgctgatcctttgcgaatacgcccacgcgatgggtaacagtcttggcggtttcgctaaatactggcaggcgtttcgtcagtatccccgtttacagggcggcttcgtctgggactgggtggatcagtcgctgattaaatatgatgaaaacggcaacccgtggtcggcttacggcggtgattttggcgatacgccgaacgatcgccagttctgtatgaacggtctggtctttgccgaccgcacgccgcatccagcgctgacggaagcaaaacaccagcagcagtttttccagttccgtttatccgggcaaaccatcgaagtgaccagcgaatacctgttccgtcatagcgataacgagctcctgcactggatggtggcgctggatggtaagccgctggcaagcggtgaagtgcctctggatgtcgctccacaaggtaaacagttgattgaactgcctgaactaccgcagccggagagcgccgggcaactctggctcacagtacgcgtagtgcaaccgaacgcgaccgcatggtcagaagccgggcacatcagcgcctggcagcagtggcgtctggcggaaaacctcagtgtgacgctccccgccgcgtcccacgccatcccgcatctgaccaccagcgaaatggatttttgcatcgagctgggtaataagcgttggcaatttaaccgccagtcaggctttctttcacagatgtggattggcgataaaaaacaactgctgacgccgctgcgcgatcagttcacccgtgcaccgctggataacgacattggcgtaagtgaagcgacccgcattgaccctaacgcctgggtcgaacgctggaaggcggcgggccattaccaggccgaagcagcgttgttgcagtgcacggcagatacacttgctgatgcggtgctgattacgaccgctcacgcgtggcagcatcaggggaaaaccttatttatcagccggaaaacctaccggattgatggtagtggtcaaatggcgattaccgttgatgttgaagtggcgagcgatacaccgcatccggcgcggattggcctgaactgccagctggcgcaggtagcagagcgggtaaactggctcggattagggccgcaagaaaactatcccgaccgccttactgccgcctgttttgaccgctgggatctgccattgtcagacatgtataccccgtacgtcttcccgagcgaaaacggtctgcgctgcgggacgcgcgaattgaattatggcccacaccagtggcgcggcgacttccagttcaacatcagccgctacagtcaacagcaactgatggaaaccagccatcgccatctgctgcacgcggaagaaggcacatggctgaatatcgacggtttccatatggggattggtggcgacgactcctggagcccgtcagtatcggcggaattccagctgagcgccggtcgctaccattaccagttggtctggtgtcaaaaataataataaccgggcaggggggatccaattctgtgagcgtatggcaaacgaaggaaaaatagttatagtagccgcactcgatgggacatttcaacgtaaaccgtttaataatattttgaatcttattccattatctgaaatggtggtaaaactaactgctgtgtgtatgaaatgctttaaggaggcttccttttctaaacgattgggtgaggaaaccgagatagaaataataggaggtaatgatatgtatcaatcggtgtgtagaaagtgttacatcgactcataatattatattttttatctaaaaaactaaaaataaacattgattaaattttaatataatacttaaaaatggatgttgtgtcgttagataaaccgtttatgtattttgaggaaattgataatgagttagattacgaaccagaaagtgcaaatgaggtcgcaaaaaaactgccgtatcaaggacagttaaaactattactaggagaattattttttcttagtaagttacagcgacacggtatattagatggtgccaccgtagtgtatataggatctgctcccggtacacatatacgttatttgagagatcatttctataatttaggagtgatcatcaaatggatgctaattgacggccgccatcatgatcctattttaaatggattgcgtgatgtgactctagtgactcggttcgttgatgaggaatatctacgatccatcaaaaaacaactgcatccttctaagattattttaatttctgatgtgagatccaaacgaggaggaaatgaacctagtacggcggatttactaagtaattacgctctacaaaatgtcatgattagtattttaaaccccgtggcgtctagtcttaaatggagatgcccgtttccagatcaatggatcaaggacttttatatcccacacggtaataaaatgttacaaccttttgctccttcatattcagctgaaatgagattattaagtatttataccggtgagaacatgagactgactcgagttaccaaattagacgctgtaaattatgaaaaaaagatgtactaccttaataagatcgtccgtaacaaagtagttgttaactttgattatcctaatcaggaatatgactattttcacatgtactttatgctgaggaccgtgtactgcaataaaacatttcctactactaaagcaaaggtactatttctacaacaatctatatttcgtttcttaaatattccaacaacatcaactgaaaaagttagtcatgaaccaatacaacgtaaaatatctagcaaaaattctatgtctaaaaacagaaatagcaagagatccgtacgcggtaataaatagaaacgtactactgagatatactaccgatatagagtataatgatttagttactttaataaccgttagacataaaattgattctatgaaaactgtgtttcaggtatttaacgaatcatccataaattatactccggttgatgatgattatggagaaccaatcattataacatcgtatcttcaaaaaggtcataacaagtttcctgtaaattttctatacatagatgtggtaatatctgacttatttcctagctttgttagactagatactacagaaactaatatagttaatagtgtactacaaacaggcgatggtaaaaagactcttcgtcttcccaaaatgttagagacggaaatagttgtcaagattctctatcgccctaatataccattaaaaattgttagatttttccgcaataacatggtaactggagtagagatagccgatagatctgttatttcagtcgctgattaatcaattagtagagatgagataagaacattataataatcaataatatatcttatatcttatatcttatatcttatatcttgtttagaaaaatgctaatattaaaatagctaacgctagtaatccaatcggaagccatttgatatctataatagggtatctaatttcctgatttaaatagcggacagctatattctcggtagctactcgtttggaatcacaaacattatttacatctaatttactatctgtaatggaaacgtttcccaatgaaatggtacaatccgatacattgcattttgttatatttttttttaaagaggctggtaacaacgcatcgcttcgtttacatggctcgtaccaacaataatagggtaatcttgtatctattcctatccgtactatgcttttatcaggataaatacatttacatcgtatatcgtctttgttagcatcacagaatgcataaatttgttcgtccgtcatgataaaaatttaaagtgtaaatataactattatttttatagttgtaataaaaagggaaatttgattgtatactttcggttctttaaaagaaactgacttgataaaaatggctgtaatctctaaggttacgtatagtctatatgatcaaaaagagattaatgctacagatattatcattagtcatgttaaaaatgacgacgatatcggtaccgttaaagatggtagactaggtgctatggatggggcattatgtaagacttgtgggaaaacggaattggaatgtttcggtcactggggtaaagtaagtatttataaaactcatatagttaagcctgaatttatttcagaaattattcgtttactgaatcatatatgtattcactgcggattattgcgttcacgagaaccgtattccgacgatattaacctaaaagagttatcgggacacgctcttaggagattaaaggataaaatattatccaagaaaaagtcatgttggaacagtgaatgtatgcaaccgtatcaaaaaattactttttcaaagaaaaaggtttgtttcgtcaacaagttggatgatattaacgttcctaattctctcatctatcaaaagttaatttctattcatgaaaagttttggccattattagaaattcatcaatatccagctaacttattttatacagactactttcccatccctccgttgattattagaccggctattagtttttggatagatagtatacccaaagagaccaatgaattaacttacttattaggtatgatcgttaagaattgtaacttgaatgctgatgaacaggttatccagaaggcggtaatagaatacgatgatattaaaattatttctaataacactaccagtatcaatttatcatatattacatccggcaaaaataatatgattagaagttatatcgtcgcccgacgaaaagatcagaccgctagatctgtaattggtcccagtacatctatcaccgttaatgaggtaggaatgcccgcatatattagaaatacacttacagaaaagatatttgttaatgcctttacagtggataaagttaaacaactattagcgtcaaaccaagttaaattttactttaataaacgattaaaccaattaacaagaatacgccaaggaaagtttattaaaaataaaatacatttattgcctggtgattgggtagaagtagctgttcaagaatatacaagtattatttttggaagacagccgtctctacatagatacaacgtcatcgcttcatctatcagagctaccgaaggagatactatcaaaatatctcccggaattgccaactctcaaaatgctgatttcgacggggatgaggaatggatgatattagaacaaaatcctaaagctgtaattgaacaaagtattcttatgtatccgacgacgttactcaaacacgatattcatggagcccccgtttatggatctattcaagatgaaatcgtagcagcgtattcattgtttaggatacaagatctttgtttagatgaagtattgaacatcttggggaaatatggaagagagttcgatcctaaaggtaaatgtaaattcagcggtaaagatatctatacttacttgataggtgaaaagattaattatccgggtctcttaaaggatggtgaaattattgcaaacgacgtagatagtaattttgttgtggctatgaggcatctgtcattggctggactcttatccgatcataagtcgaacgtggaaggtatcaactttattatcaagtcatcttatgtttttaagagatatctatctatttacggttttggggtgacattcaaagatctgagaccaaattcgacgttcactaataaattggaggccatcaacgtagaaaaaatagaacttatcaaagaagcatacgccaaatatctcaacgatgtaagagacgggaaaatagttccattatctaaagctttagaggcggactatgtggaatccatgttatccaacttgacaaatcttaatatccgagagatagaagaacatatgagacaaacgctgatagatgatccagataataacctcctgaaaatggccaaagcgggttataaagtaaatcccacagaactaatgtatattctaggtacgtatggacaacaaaggattgatggtgaaccagcagagactcgagtattgggtagagttttaccttactatcttccagactctaaggatccagaaggaagaggttacattcttaattctttaacaaaaggattaacgggttctcaatattacttttcgatgctggttgccagatctcaatctactgatatcgtctgtgaaacatcacgtaccggaacactggctagaaaaatcattaaaaagatggaggatatggtggtcgacggatacggacaagtagttataggtaatacgctcatcaagtacgccgccaattataccaaaattctaggctcagtatgtaaacctgtagatcttatctatccagatgagtccatgacttggtatttggaaattagtgctctgtggaataaaataaaacagggattcgtttactctcagaaacagaaacttgcaaagaagacattggcgccgtttaatttcctagtattcgtcaaacccaccactgaggataatgctattaaggttaaggatctgtacgatatgattcataacgtcattgatgatgtgagagagaaatacttctttacggtatctaatatagattttatggagtatatattcttgacgcatcttaatccttctagaattagaattacaaaagaaacggctatcactatctttgaaaagttctatgaaaaactcaattatactctaggtggtggaactcctattggaattatttctgcacaggtattgtctgagaagtttacacaacaagccctgtccagttttcacactactgaaaaaagtggtgccgtcaaacaaaaacttggtttcaacgagtttaataacttgactaatttgagtaagaataagaccgaaattatcactctggtatccgatgatatctctaaacttcaatctgttaagattaatttcgaatttgtatgtttgggagaattaaatccaaacatcactcttcgaaaagaaacagataaatatgtagtagatataatagtcaatagattatacatcaagagagcagaaataaccgaattagtcgtcgaatatatgattgaacgatttatctcctttagcgtcattgtaaaggaatggggtatggagacattcattgaggacgaggataatattagatttactgtctacctaaatttcgttgaaccggaagaattgaatcttagtaagtttatgatggttcttccgggggcagccaacaagggaaagattagtaaattcaagattcctatctctgattatacgggatatgacgacttcaatcaaacaaaaaagctcaataagatgactgtagaactcatgaatctaaaagaattgggttctttcgatttggaaaacgtcaacgtgtatcctggagtatggaatacatacgatatcttcggtatcgaggccgctcgtgaatacttgtgcgaagccatgttaaacacctatggagaagggttcgattatctgtatcagccttgtgatcttctcgctagtttactatgtgctagttacgaaccagaatcagtgaataaattcaagttcggcgcagctagtactcttaagagagctacgttcggagacaataaagcattgttaaacgcggctcttcataaaaagtcagaacctattaacgataatagtagctgccacttttttagcaaggtccctaatataggaactggatattacaaatactttatcgacttgggtcttctcatgagaatggaaaggaaactatctgataagatatcttctcaaaagatcaaggaaatggaagaaacagaagacttttaattcttatcaataacatatttttctatgatctgtcttttaaacgatggattttccacaaatgcgcctctcaagtccctcatagaatgatacacgtataaaaaatatagcataggcaatgactccttatttttagacattagatatgccaaaatcatagccccgcttctatttactcccgcagcacaatgaaccaacacgggctcgtttcgttgatcacatttagataaaaaggcggttacgtcgtcaaaatatttactaatatcggtagttgtatcatctaccaacggtatatgaataatattaatattagagttaggtaatgtatatttatccatcgtcaaatttaaaacatatttgaacttaacttcagatgatggtgcatccatagcatttttataatttcccaaatacacattattggttacccttgtcattatagtgggagatttggctttgtgcatatctccagttgaacgtagtagtaagtatttatacaaacttttcttatccatttataacgtacaaatggataaaactactttatcggtaaacgcgtgtaatttagaatacgttagagaaaaggctatagtaggcgtacaagcagccaaaacatcaacacttatattctttgttattatattggcaattagtgcgctattactctggtttcagacgtctgataatccagtctttaatgaattaacgagatatatgcgaattaaaaatacggttaacgattggaaatcattaacggatagcaaaacaaaattagaaagtgatagaggtagacttctagccgctggtaaggatgatatatttgaattcaaatgtgtggatttcggcgcctattttatagctatgcgattggataagaaaacatatctgccgcaagctattaggcgaggtactggagacgcgtggatggttaaaaaggcggcaaaggtcgatccatctgctcaacaattttgtcagtatttgataaaacacaagtctaataatgttattacttgtggtaatgagatgttaaatgaattaggttatagcggttattttatgtcaccgcattggtgttccgattttagtaatatggaatagtgttagataaatgcggtaacgaatgttcctgtaaggaaccataacagcttagatttaacgttaaagatgagcataaacataataaacaaaattacaatcaaacttataacattaatatcaaacaatccaaaaaatgaaatcagtggagtagtaaacgcgtacataactcctggataacgtttagcagctgccgttcctattctagaccaaaaattcggtttcatgttttcgaaacggtattctgcaacaagtcgaggatcgtgttctacatatttggcggcattatccagtatctgcctattgatcttcatttcgttttcgattctggctatttcaaaataaaatcccgatgatagacctccagactttataatttcatctacgatgttcagcgccgtagtaactctaataatataggctgataagctaacatcataccctcctgtatatgtgaatatggcatgatttttgtccattacaagctcggttttaactttattgcctgtaataatttctctcatctgtaggatatctatttttttgtcatgcattgccttcaagacgggacgaagaaacgtaatatcctcaataacgttatcgttttctacaataactacatattctacctttttattttctaactcggtaaaaaaattagaatcccatagggctaaatgtctagcgatatttcttttcgtttcctctgtacacatagtgttacaaaaccctgaaaagaagtgagtatacttgtcatcatttctaatgtttcctccagtccactgtataaacgcataatccttgtaatgatctggatcatccttgactaccacaacatttcttttttctggcataacttcgttgtcctttacatcatcgaacttctgatcattaatatgctcatgaacattaggaaatgtttctgatggaggtctatcaataactggcacaacaataacaggagttttcaccgccgccatttagttattgaaattaatcatatacaactctttaatacgagttatattttcgtctatccattgtttcacattgacatatttcgacaaaaagatataaaatgcgtattccaatgcttctctgtttaatgaattactaaaatatacaaacacgtcactgtctggcaataaatgatatcttagaatattgtaacaatttattttgtattgcacatgttcgtgatctatgagttcttcttcgaatggcataggatctccgaatctgaaaacgtataaataggagttagaataataatatttgagagtattggtaatatataaactctttagcggtataattagtttttttctctcaatttctatttttagatgtgatggaaaaatgactaattttgtagcattagtatcatgaactctaatcaaaatcttaatatcttcgtcacacgttagctctttgaagtttttaagagatgcatcagttggttctacagatggagtaggtgcaacaattttttgttctacacatgtatgtactggagccattgttttaactataatggtgcttgtatcgaaaaactttaatgcagatagcggaagctcttcgccgcgactttctacgtcgtaattgggttctaacgccgatctctgaatggatactagttttctaagttctaatgtgattctctgaaaatgtaaatccaattcctccggcattatagatgtgtatacatcggtaaataaaactatagtatccaacgatcccttctcgcaaattctagtcttaaccaaaaaatcgtatataaccacggagatggcgtatttaagagtggattcttctaccgttttgttcttggatgtcatataggaaactataaagtccgcactactgttaagaatgattactaacgcaactatatagtttaaattaagcattttggaaacataaaataactctgtagacgatacttgactttcgaataagtttgcagacaaacgaagaaagaacagacctctcttaatttcagaagaaaactttttttcgtattcctgacgtctagagtttatatcaataagaaagttaagaattagtcggttaatgttgtatttcattacccaagtttgagatttcataatattatcaaaagacatgataatattaaagataaagcgctgactatgaacgaaatagctatatggttcgctcaagaatatagtcttgttaaacgtggaaacgataactgtatttttaatcacgtcagcggcatctaaattaaatataggtatatttattccacacactctacaatatgccacaccatcttcataataaataaattcgttagcaaaattattaattttagtgaaatagttagcgtcaactttcatagcttccttcaatctaatttgatgctcacacggtgcgaattccactctaacatcccttttccatgcctcaggttcatcgatctctataatatctagttttttgcgtttcacaaacacaggctcgtctctcgcgatgagatctgtatagtaactatgtaaatgataactagatagaaagatgtagctatatagatgacgatcctttaagagaggtataataactttaccccaatcagatagactgttgttatggtcttcggaaaaagaatttttataaatttttccagtattttccaaatatacgtacttaacatctaaaaaatccttaatgataataggaatggataatccgtctattttataaagaaatacatatcgcacattatacttttttttggaaatgggaataccgatgtgtctacataaatatgcaaagtctaaatattttttagagaatcttagttggtccaaattcttttccaagtacggtaatagatttttcatattgaacggtatcttcttaatctctggttctagttccgcattaaatgatgaaactaagtcactatttttataactaacgattacatcacctctaacatcatcatttaccagaatactgatcttcttttgtcgtaaatacatgtctaatgtgttaaaaaaaagatcatacaagttatacgtcatttcatctgtggtattcttgtcattgaaggataaactcgtactaatctcttctttaacagcctgttcaaatttatatcctatatacgaaaaaatagcaaccagtgtttgatcatccgcgtcaatattctgttctatcgtagtgtataacaatcgtatatcttcttctgtgatagtcgatacgttataaaggttgataacgaaaatatttttatttcgtgaaataaagtcatcgtaggattttggacttatattcgcgtctagtagatatgcttttatttttggaatgatctcaattagaatagtctctttagagtccatttaaagttacaaacaactaggaaattggtttatgatgtataatttttttagtttttatagattctttattctatacttaaaaaatgaaaataaatacaaaggttcttgagggttgtgttaaattgaaagcgagaaataatcataaattatttcattatcgcgatatccgttaagtttgtatcgtaatggcgtggtcaattacgaataaagcggatactagtagcttcacaaagatggctgaaatcagagctcatctaaaaaatagcgctgaaaataaagataaaaacgaggatattttcccggaagatgtaataattccatctactaagcccaaaaccaaacgagccactactcctcgtaaaccagcggctactaaaagatcaaccaaaaaggaggaagtggaagaagaagtagttatagaggaatatcatcaaacaactgaaaaaaattctccatctcctggagtcagcgacattgtagaaagcgtggccgctgtagagctcgatgatagcgacggggatgatgaacctatggtacaagttgaagctggtaaagtaaatcatagtgctagaagcgatctctctgacctaaaggtggctaccgacaatatcgttaaagatcttaagaaaattattactagaatctctgcagtatcgacggttctagaggatgttcaagcagctggtatctctagacaatttacttctatgactaaagctattacaacactatctgatctagtcaccgagggaaaatctaaagttgttcgtaaaaaagttaaaacttgtaagaagtaaatgcgtgcacttttttataaagatggtaaactctttaccgataataattttttaaatcctgtatcagacgataatccagcgtatgaggttttgcaacatgttaaaattcctactcatttaacagatgtagtagtatatgaacaaacgtgggaggaggcgttaactagattaatttttgtgggaagtgattcaaaaggacgtagacaatacttttacggaaaaatgcatgtacagaatcgcaacgctaaaagagatcgtatttttgttagagtatataacgttatgaaacgaattaattgttttataaacaaaaatataaagaaatcgtccacagattccaattatcagttggcggtttttatgttaatggaaactatgttttttattagatttggtaaaatgaaatatcttaaggagaatgaaacagtagggttattaacactaaaaaataaacacatagaaataagtcccgatgaaatagttatcaagtttgtaggaaaggacaaagtttcacatgaatttgttgttcataagtctaatagactatataaaccgctattgaaactgacggatgattctagtcccgaagaatttctgttcaacaaactaagtgaacgaaaggtatacgaatgtatcaaacagtttggtattagaatcaaggatctccgaacgtatggagtcaattatacgtttttatataatttttggacaaatgtaaagtccatatctcctcttccgtcaccaaaaaagttaatagcattaactatcaaacaaactgctgaagtggtaggtcatactccatcaatttcaaaaagagcttatatggcaacgactattttagaaatggtaaaggataaaaattttttagatgtagtatctaaaactacgttcgatgaattcctatctatagtcgtagatcacgttaaatcatctacggatggatgatatagatctttacacaaataattacaagaccgataaatggaaatggataagcgtatgaaatctctcgcaatgacagctttcttcggagagctaagcacattagatattatggcattgataatgtctatatttaaacgccatccaaacaataccattttttcagtggataaggatggtcagtttatgattgatttcgaatacgataattataaggcttctcaatatttggatctgaccctcactccgatatctggagatgaatgcaagactcacgcatcgagtatagccgaacaattggcgtgtgcggatattattaaagaggatattagcgaatatatcaaaactactccccgtcttaaacgatttataaaaaaataccgcaatagatcagatactcgtatcagtcgagatacagaaaagcttaaaatagctctagctaaaggcatagattacgaatatataaaagacgcttgttaataagtaaatgaaaaaaaactagtcgtttataataaaacacgatatggatgccaacgtagtatcattttctactattgcgacgtatatagacgctttagcgaagaatgcttcggaattagaacagaggtctaccgcatacgaaataaataatgaattggaactagtatttattaagccgccattgattactttgacaaatgtagtgaatatctctacgattcaggaatcgtttattcgatttaccgttactaataaggaaggtgttaaaattagaactaagattccattatctaaggtacatggtctagatgtaaaaaatgtacagttagtagatgctatagataacatagtttgggaaaagaaatcattagtgacggaaaatcgtcttcacaaagaatgcttgttgagactatcgacagaggaacgtcatatatttttggattacaagaaatatggatcctctatccgactagaattagtcaatcttattcaagcaaaaacaaaaaactttacgatagactttaagctaaaatattttctaggatccggtgcccagtctaaaagttctttgttgcacgctattaatcatccaaagtcaaggcctaatacatctctggaaatagaattcacacctagagacaatgaaacagttccatatgatgaactaataaaggaattgacgactctctcgcgtcatatatttatggcttctccagagaatgtaattctttctccgcctattaacgcgcctataaaaacctttatgttgcctaaacaagatatagtaggtttggatctggaaaatctatatgccgtaactaagactgacggcattcctataactatcagagttacatcaaacgggttgtattgttattttacacatcttggttatattattagatatcctgttaagagaataatagattccgaagtagtagtctttggtgaggcagttaaggataagaactggaccgtatatctcattaagctaatagagcctgtgaatgcaatcaatgatagactagaagaaagtaagtatgttgaatctaaactagtggatatttgtgatcggatagtattcaagtcaaagaaatacgaaggtccgtttactacaactagtgaagtcgtcgatatgttatctacatatttaccaaagcaaccagaaggtgttattctgttctattcaaagggacctaaatctaacattgattttaaaattaaaaaggaaaatactatagaccaaactgcaaatgtagtatttaggtacatgtccagtgaaccaattatctttggagaatcgtctatctttgtagagtataagaaatttagcaacgataaaggctttcctaaagaatatggttctggtaagattgtgttatataacggcgttaattatctaaataatatctattgtttggaatatattaatacacataatgaagtgggtattaagtccgtggttgtacctattaagtttatagcagaattcttagttaatggagaaatacttaaacctagaattgataaaaccatgaaatatattaactcagaagattattatggaaatcaacataatatcatagtcgaacatttaagagatcaaagcatcaaaataggagatatctttaacgaggataaactatcggatgtgggacatcaatacgccaataatgataaatttagattaaatccagaagttagttattttacgaataaacgaactagaggaccgttgggaattttatcaaactacgtcaagactcttcttatttctatgtattgttccaaaacatttttagacgattccaacaaacgaaaggtattggcgattgattttggaaacggtgctgacctggaaaaatacttttatggagagattgcgttattggtagcgacggatccggatgctgatgctatagctagaggaaatgaaagatacaacaaattaaactctggaattaaaaccaagtactacaaatttgactacattcaggaaactattcgatccgatacatttgtctctagtgtcagagaagtattctattttggaaagtttaatatcatcgactggcagtttgctatccattattcttttcatccgagacattatgctaccgtcatgaataacttatccgaactaactgcttctggaggcaaggtattaatcactaccatggacggagacaaattatcaaaattaacagataaaaagacttttataattcataagaatttacctagtagcgaaaactatatgtctgtagaaaaaatagctgatgatagaatagtggtatataatccatcaacaatgtctactccaatgactgaatacattatcaaaaagaacgatatagtcagagtgtttaacgaatacggatttgttcttgtagataacgttgatttcgctacaattatagaacgaagtaaaaagtttattaatggcgcatctacaatggaagatagaccgtctacaaaaaactttttcgaactaaatagaggagccattaaatgtgaaggtttagatgtcgaagacttacttagttactatgttgtttatgtcttttctaagcggtaaataataatatggtatgggttctgatctcccagttctaaatgcattaaataattccaatagagcgatttttgttcctataggaccttccaactgtggatactctgtattgttaatagatatattaatacttttgtcgggtaacagaggttctacgtcttctaaaaataaaagttttataacatctggcctgttcataaataaaaacttggcgattctatatatactcttattatcaaatctagccattgtcttatagatgtgagctactgtaggtgtaccatttgattttctttctaatactatatatttctctcgaagaagttcttgcacatcatctgggaataaaatactactgttgagtaaatcagttattttttttatatcgatattgatggacatttttatagttaaggataataagtatcccaaagtcgataacgacgataacgaagtatttatacttttaggaaatcacaatgactttatcagattaaaattaacaaaattaaaggagcatgtatttttttctgaatatattgtgactccagatacatatggatctttatgcgtcgaattaaatgggtctagttttcagcacggcggtagatatatagaggtggaggaatttatagatgctggaagacaagttagatggtgttctacatccaatcatatatctaaagatatacccgaagatatgcacactgataaatttgtcatttatgatatttatacgtttgattcgttcaagaataaacgattggtattcgtacaggtacctccgtcgttaggagatgatagtcatttgactaatccgttattgtcaccgtattatcgtaattcagtagccagacaaatggtcaatgatatgatttttaatcaagattcatttttaaaatatttattagaacatctgattagaagccactatagagtttctaaacatataacaatagttagatacaaggataccgaagaattaaatctaacgagaatatgttataatagagataagtttaaggcgtttgtattcgcttggtttaacggcgtttcggaaaatgaaaaggtactagatacgtataaaaaggtatctaatttgatataatgaattcagtgactgtatcacacgcgccatatactattacttatcacgatgattgggaaccagtaatgagtcaattggtagagttttataacgaagtagccagttggctgctacgagacgagacgtcgcctattcctgataagttctttatacagttgaaacaaccgcttagaaataaacgagtatgtgtgtgtggtatagatccgtatccgaaagatggaactggtgtaccgttcgaatcaccaaattttacaaaaaaatcaattaaggagatagcttcatctatatctagattaaccggagtaattgattataaaggttataaccttaatataatagacggggttataccctggaattattacttaagttgtaaattaggagaaacaaaaagtcacgcgatttactgggataagatttccaagttactgctgcagcatataactaaacacgttagtgttctttattgtttgggtaaaacagatttctcgaatatacgggccaagttagaatccccggtaactaccatagtcggatatcatccagcggctagagaccgccaattcgagaaagatagatcatttgaaattatcaacgttttactggaattagacaacaaggcacctataaattgggctcaagggtttatttattaatgctttagtgaaattttaacttgtgttctaaatggatgcggctattagaggtaatgatgttatctttgttcttaagactataggtgtcccgtcagcgtgcagacaaaatgaagatccaagatttgtagaagcatttaaatgcgacgagttagaaagatatattgagaataatccagaatgtacactattcgaaagtcttagggatgaggaagcatactctatagtcagaattttcatggatgtagatttagacgcgtgtctagacgaaatagattatttaacggccattcaagattttattatcgaggtgtcaaactgtgtagctagattcgcgtttacagaatgcggcgccattcatgaaaatgtaataaaatccatgagatctaatttttcattgactaagtctacaaatagagataaaacaagttttcatattatctttttagatacgtataccactatggatacattgatagctatgaaacgaacactattagaattaagtagatcatctgaaaatccactaaccagatcgatagacactgccgtatataggagaaaaacaactcttcgggttgtaggtactaggaaaaatccaaattgcgacactattcatgtaatgcaaccaccgcatgataatatagaagattacctattcacttacgtggatatgaacaacaatagttattacttttctctacaacaacgattggaggatttagttcctgataagttatgggaaccagggtttatttcattcgaagacgctataaaaagagtttcaaaaatattcattaattctataataaactttaatgatctcgatgaaaataattttacaacggtaccactggtcatagattacgtaacaccttgtgcattatgtaaaaaacgatcgcataaacatccgcatcaactatcgttggaaaatggtgctattagaatttacaaaactggtaatccacatagttgtaaagttaaaattgttccgttggatggtaataaactgtttaatattgcacaaagaattttagacactaactctgttttattaaccgaacgaggagaccatatagtttggattaataattcatggaaatttaacagcgaagaacccttgataacaaaactaattttgtcaataagacatcaactacctaaggaatattcaagcgaattactctgtccaagaaaacgaaagactgtagaagctaacatacgagacatgttagtagattcagtggagaccgatacctatccggataaacttccgtttaaaaatggtgtattggacctggtagacggaatgttttactctggagatgatgctaaaaaatatacgtgtactgtatcaaccggatttaaatttgacgatacaaagttcgtcgaagacagtccagaaatggaagagttaatgaatatcattaacgatatccaaccattaacggatgaaaataagaaaaatagagagctatatgaaaaaacattatctagttgtttatgcggtgctaccaaaggatgtttaacattcttttttggagaaactgcaactggaaagtcgacaaccaaacgtttgttaaagtctgctatcggtgacctgtttgttgagacgggtcaaacaattttaacagatgtattggataaaggacctaatccatttatcgctaacatgcatttgaaaagatctgtattctgtagcgaactacctgattttgcctgtagtggatcaaagaaaattagatctgacaatattaaaaagttgacagaaccttgtgtcattggaagaccgtgtttctccaataaaattaataatagaaaccatgcgacaatcattatcgatactaattacaaacctgtttttgataggatagataacgcattaatgagaagaattgccgtcgtgcgattcagaacacacttttctcaaccttctggtagagaggctgctgaaaataatgacgcgtacgataaagtcaaactattagacgaggggttagatggtaaaatacaaaataatatatatagatttgcatttctatacttgttggtgaaatggtacaaaaaatatcatgttcctattatgaaactatatcctacacccgaagagattcctgactttgcattctatctcaaaataggtactctgttggtatctagctctgtaaagcatattccattaatgacggacctctccaaaaagggatatatattgtacgataatgtggtcactcttccgttgactactttccaacagaaaatatccaagtattttaattctagactatttggacacgatatagagagcttcatcaatagacataagaaatttgccaatgttagtgatgaatatctgcaatatatattcatagaggatatttcatctccgtaaatatatgctcatatatttatagaagatatcacatatctaaatgaataccggaatcatagatttatttgataatcatgttgatagtataccaactatattacctcatcagttagctactctagattatctagttagaactatcatagatgagaacagaagcgtgttattgttccatattatgggatcaggtaaaacaataatcgctttgttgttcgccttggtagcttccagatttaaaaaggtttacattctagtgccgaacatcaacatcttaaaaattttcaattataatatgggtgtagctatgaacttgtttaatgacgaattcatagctgagaatatctttattcattccacaacaagtttttattctcttaattataacgataacgtcattaattataacggattatctcgctacaataactctatttttatcgttgatgaggcacataatatctttgggaataatactggagaacttatgaccgtgataaaaaataaaaacaagattccttttttactattgtctggatctcccattactaacacacctaatactctgggtcatattatagatttaatgtccgaagagacgatagattttggtgaaattattagtcgtggtaagaaagtaattcagacacttcttaacgaacgcggtgtgaatgtacttaaggatttgcttaaaggaagaatatcatattacgaaatgcctgataaagatctaccaacgataagatatcacggacgtaagtttctagatactagagtagtatattgtcacatgtctaaacttcaagagagagattatatgattactagacgacagctatgttatcatgaaatgtttgataaaaatatgtataacgtgtcaatggcagtattgggacaacttaatctgatgaataatttagatactttatttcaggaacaggataaggaattgtacccaaatctgaaaataaataatggcgtgttatacggagaagaattggtaacgttaaacattagttccaaatttaaatactttattaatcggatacagacactcaacggaaaacattttatatacttttctaattctacatatggcggattggtaattaaatatatcatgctcagtaatggatattctgaatataatggttctcagggaactaatccacatatgataaacggcaaaccaaaaacatttgctatcgttactagtaaaatgaaatcgtctttagaggatctattagatgtgtataattctcctgaaaacgatgatggtagtcaattgatgtttttgttttcatcaaacattatgtccgaatcctatactctaaaagaggtaaggcatatttggtttatgactatcccagatactttttctcaatacaaccaaattcttggacgatctattagaaaattctcttacgccgatatttctgaaccagttaatgtatatcttttagccgccgtatattccgatttcaatgacgaagtgacgtcattaaacgattacacacaggatgaattaattaatgttttaccatttgacatcaaaaagctgttgtatctaaaatttaagacgaaagaaacgaatagaatatactctattcttcaagagatgtctgaaacgtattctcttccaccacatccatcaattgtaaaagttttattgggagaattggtcagacaatttttttataataattctcgtattaagtataacgataccaagttacttaaaatggttacatcagttataaaaaataaagaagacgctaggaattacatagatgatattgtaaacggtcacttctttgtatcgaataaagtatttgataaatctcttttatacaaatacgaaaacgatattattacagtaccgtttagactttcctacgaaccatttgtttggggagttaactttcgtaaagaatataacgtggtatcttctccataaaactgatgagatatataaagaaataaatgtcgagctttgttaccaatggatacctttccgttacattggaaccacacgagctgacgttagacataaaaactaatattaggaatgccgtatataagacgtatctccatagagaaattagtggtaaaatggccaagaaaatagaaattcgtgaagacgtggaattacctctcggcgaaatagttaataattctgtagttataaacgttccgtgtgtaataacctacgcgtattatcacgttggggatatagtcagaggaacattaaacatcgaagatgaatcaaatgtaactattcaatgtggagatttaatctgtaaactaagtagagattcgggtactgtatcatttagcgattcaaagtactgcttttttcgaaatggtaatgcgtatgacaatggcagcgaagtcactgccgttctaatggaggctcaacaaggtatcgaatctagttttgtttttctcgcgaatatcgtcgactcataaaaaagagaatagcggtaagtataaacacgaatactatggcaataattgcgaatgttttattctcttcgatatatttttgataatatgaaaaacatgtctctctcaaatcggacaaccatctcataaaatagttctcgcgcgctggagaggtagttgccgctcgtataatctctccagaataatatacttgcgtgtcgtcgttcaatttatacggatttctatagttctctgttatataatgcggtttgccctcatgattagacgacgacaatagtgttctaaatttagatagttgatcagaatgaatgtttattggcgttggaaaaattatccatacagcgtctgcagagtggttgatagttgttcctagatatgtaaaataatccaacttactaggcagcaaattgtctagataaaatactgaatcaaacggtgcagacgtattggcggatctaatggaatccaattgattaactatcttttgaaaatatacatttttatgatccaatacttgtaagaatatagaaataatgataagtccatcatcgtgtttttttgcctcttcataagaactatattttttcttattccaatgaacaagattaatctctccagagtatttgtacacatctatcaagtgattggatccataatcgtcttcctttccccaatatatatgtagtgatgataacacatattcattggggagaaaccctccacttatatatcctcctttaaaattaatccttactagttttccagtgttctggatagtggttggtttcgactcattataatgtatgtctaacggcttcaatcgcgcgttagaaattgcttttttagtttctatattaataggagatagttgttgcggcatagtaaaaatgaaatgataactgtttaaaaatagctcttagtatgggaattacaatggatgaggaagtgatatttgaaactcctagagaattaatatctattaaacgaataaaagatattccaagatcaaaagacacgcatgtgtttgctgcgtgtataacaagtgacggatatccgttaataggagctagaagaacttcattcgcgttccaggcgatattatctcaacaaaattcagattctatctttagagtatccactaaactattacggtttatgtactacaatgaactaagagaaatctttagacggttgagaaaaggttctatcaacaatatcgatcctcactttgaagagttaatattattgggtggtaaactagataaaaaggaatctattaaagattgtttaagaagagaattaaaagaggaaagtgatgaacgtataacagtaaaagaatttggaaatgtaattctaaaacttacaacacgggataaattatttaataaagtatatataagttattgcatggcgtgttttattaatcaatcgttggaggatttatcgcatactagtatttacaatgtagaaattagaaagattaaatcattaaatgattgtattaacgacgataaatacgaatatctgtcttatatttataatatgctagttaatagtaaatgaacttttacagatctagtataattagtcagattattaagtataatagacgactagctaagtctattatttgcgaggatgactctcaaattattacactcacggcattcgttaaccaatgcctatggtgtcataaacgagtatccgtgtccgctattttattaactactgataacaaaatattagtatgtaacagacgagatagttttctctattctgaaataattagaactagaaacatgtttagaaagaaacgattatttctgaattattccaattatttgaacaaacaggaaagaagtatactatcgtcatttttttctctagatccagctactactgataatgatagaatagacgctatttatccgggtggcatacccaaaaggggtgagaatgttccagagtgtttatccagggaaattaaagaagaagttaatatagacaattcttttgtattcatagacactcggttttttattcatggcatcatagaagataccattattaataaattttttgaggtaatcttctttgtcggaagaatatctctaacgagtgatcaaatcattgatacatttaaaagtaatcatgaaatcaaggatctaatatttttagatccgaattcaggtaatggactccaatacgaaattgcaaaatatgctctagatactgcaaaacttaaatgttacggccatagaggatgttattatgaatcattaaaaaaattaactgaggatgattgattaaaaaatataaattaatttaccatcgtgtatttttataacgggattgtccggcatatcatgtagatagttaccgtctacatcgtatactcgaccatctacgcctttaaatcctctatttattgacattaatctattagaattggaataccaaatattagtaccctcaattagtttattggtaatattttttttagacgatagatcgatggctcttgaaaccaaggttttccaaccggactcattgtcgatcggtgagaagtctttttcattagcatgaatccattctaatgatgtatgtttaaacactctaaacaattggacaaattcttttgatttgctttgaatgatttcaaataggtcttcgtctacagtaggcataccattagataatctagccattataaagtgcacgtttacatatctacgttctggaggagtaagaacgtgactattgagacgaatggctcttcctactatctgacgaagagacgcctcgttccatgtcatatctaaaatgaagatatcattaattgagaaaaaactaataccctcgcctccactagaagagaatacgcatgttttaatgcattctccgttagtgtttgattcttggttaaactcagccaccgccttgattctagtatcttttgttctagatgagaactctatattagagataccaaagactttgaaatatagtaataagatttctattcctgactgattaacaaatggttcaaagactagacatttaccatgggatgctaatattcccaaacatacatctataaatttgacgcttttctcttttaattcagtaaatagagagatatcagccgcactagcatcccctttcaatagttctccctttttaaaggtatctaatgcggatttagaaaactctctatctcttaatgaatttttaaaatcattatatagtgttgctatctcttgcgcgtattcgcccggatcacgattttgtctttcaggaaagctatcgaacgtaaacgtagtagccatacgtctcagaattctaaatgatgatatacctgtttttatttcagcgagtttagccttttgataaatttcttcttgctttttcgacatattaacgtatcgcattaatactgttttcttagcgaatgatgcagacccttctacgtcatcaaaaatagaaaactcgttattaactatatacgaacatagtcctcctagtttggagactaattctttttcatcgactagacgtttattctcaaatagcgattggtgttgtaaggatcctggtcgtagtaagttaaccaacatggtgaattcttgcacactattgacgataggtgtagccgataaacaaatcatcttatggttttttaacgcaatggtcttagataaaaaattatatactgaacgagtaggacggatcttaccatcttctttgattaatgatttagaaatgaagttatgacattcatcaataatgacgcatattctactcttggaattaatagttttgatattagtaaaaaatttatttctaaaattttgatcatcgtaattaataaaaatacaatccttcgttatctctggagcgtatctgagtatagtgttcatccaaggatcttctatcaaagcctttttcaccaataagataatagcccaattcgtataaatatccttaagatgtttgagaatatatacagtagtcattgttttaccgacacccgtttcatggaacaataaaagagaatgcatactgtctaatcctaagaaaactcttgctacaaaatgttgataatccttgaggcgtactacgtccgaccccatcatttcaacgggcatattagtagttctgcgtaaggcataatcgatataggccgcgtgtgatttactcatttatgagtgataagtaataactatgttttaaaaatcacagcagtagtttaactagtcttctctgatgtttgttttcgatactttttgaatcagaagtcatactagaataaagcaacgagtgaacgtaatagagagcttcgtatactctattcgaaaactctaagaacttattaatgaattccgtatccactggattgtttaaaatactaaattgaacactgttcacatccttccaagaagaagacttagtgacggacttaacatgagacataaataaatccaaattttttttacaaacatcactagccaccataatggcgctatctttcaaccagctatcgcttacgcattttagcagtctaacatttttaaagagactacaatatattctcatagtatcgattacacctctaccgaataaagttggaagtttaataatacaatatttttcgtttacaaaatcaaataatggtcgaaacacgtcgaaggttaacatcttataatcgctaatgtatagattgttttcagtgagatgattattagatttaatagcatctcgttcacgtttgaacagtttattgcgtgcgctgaggtcggcaactacggcgtccgctttagtactcctcccataatactttacgctattaatctttaaaatttcatagactttatctagatcgctttctggtaacatgatatcatgtgtaaaaagttttaacatgtcggtcggcattctatttagatcattaactctagaaatctgaagaaagtaattagctccgtattccagactaggtaatgggcttttacctagagacagattaagttctggcaatgtttcataaaatggaagaaggacatgcgttccctcccggatattttttacaatttcatccatttacaactctatagtttgttttcattattattagttattatctcccataatcttggtaatacttaccccttgatcgtaagataccttatacaggtcattacatacaactaccaattgtttttgtacataatagattggatggttgacatccatggtggaataaactactcgaacagatagtttatctttccccctagatacattagccgtaatagttgtcggcctaaagaatatctttggtgtaaagttaaaagttagggttcttgttccattattgctttttgtcagtagttcattataaattctcgagatgggtccgttctctgaatatagaacatcatttccaaatctaacttctagtctagaaataatatcggtcttattcttaaaatctattcccttgatgaagggatcgttaatgaacaaatccttggcctttgattcggctgatctattatctccgttatagacgttacgttgactagtccaaagacttacaggaatagatgtatcgatgatgttgatactatgtgatatgtgagcaaagattgttctcttagtggcatcactatatgttccagtaatggcggaaaactttttagaaatgttatatataaaagaattttttcgtgttccaaacattagcagattagtatgaagataaacactcatattatcaggaacattatcaatttttacatacacatcagcatcttgaatagaaacgataccatcttctggaacctctacgatctcggcagactccggataaccagtcggtgggccatcgctaacaataactagatcatccaacaatctactcacatatgcatctatataatctttttcatcttgtgagtaccctggatacgaaataaatttattatccgtatttccataataaggtttagtataaacagagagagatgttgccgcatgaacttcagttacagtcgccgttggttggtttatttgacctattactctcctaggtttctctataaacgatggtttaatttgtacattcttaaccatatatccaataaagctcaattcaggaacataaacaaattctttgttgaacgtttcaaagtcgaacgaagagtcacgaataacgatatcggatactggattgaaggttaccgttacggtaatttttgaatcggatagtttaagactgctgaatgtatcttccacatcaaacggagttttaatataaacgtatactgtagatggttctttaatagtgtcattaggagttaggccaatagaaatatcattaagttcactagaatatccagagtgtttcaaagcaattgtattattgatacaattattatataattcttcgccctcaatttcccaaataacaccgttacacgaagagatagatacgtgattaatacatttatatccaacatatggtacgtaactgaatcttcccatacctttaacttctggaagttccaaactcagaaccaaatgattaagcgcagtaatatactgatccctaatttcgaagctagcgatagcctgattgtctggaccatcgtttgtcataactccggatagagaaatatattgcggcatatacaaagttggaatttgactatcgactgcgaagacattagaccgtttaatagagtcatccccaccgatcaaagaattaatgatagtattattcattttctatttaaaatggaaaaagcttacaataaactccgtagagaaatatctataatttgtgagttttccttaaagtaacagcttccgtaaacgccgtctttatctcttagtaggtttattgtatttatgaccttttccttatcttcatagaatactaaaggcaacaaagaaatttttggttcttctctaagagctacgtgagacttaaccatagaagccaacgaatccctacatattttagaacagaaataccctacttcaccacccttgtatgtctcaatactaataggtctaaaaaccaaatcttgattacaaaaccaacacttatcaattacactatttgtcttaatagacacatctgccatagatttataatactttggtagtatacaagcgagtgcttcttctttagcgggcttaaagactgctttaggtgctgaaataaccacatctggaaggcttactcgcttagccatttaattacggaactatttttttatacttctaatgagcaagtagaaaacctctcatctacaaaaacgtactcgtgtccataatcctctaccatagttacacgttttttagatctcatatgtgctaaaaagttttcccatactaattggttactattatttttcgtataatttttaacagtttgaggttttagatttttagttacagaagtgatatcgaatattttatccaaaaagaatgaataattaattgtcttagaaggagtgttttcttggcaaaagaataccaagtgcttaaatatttctactacttcattaatcttttctgtactcagattcagtttctcatcttttacttgattgattatttcaaagactaacttataatcctttttatttattctctcgttagccttaagaaaactagatacaaaatttgcatctacatcatccgtggatatttgatttttttccatgatatccaagagttccgagataatttctccagaacattgatgagacaataatctccgcaatacatttctcaaatgaataagtttattagacacgtggaagtttgactttttttgtacctttgtacatttttgaaataccgactcgcaaaaaatacaatattcatatccttgttcagatactataccgttatgtctacaaccgctacataatcgtagattcatgttaacactctacgtatctcgtcgtccaatattttatataaaaacattttatttctagacgttgccagaaaatcctgtaatatttttagttttttgggctgtgaataaagtatcgccctaatattgttaccgtcttccgccaatatagtagttaaattatccgcacatgcagaagaacaccgcttaggcggattcagtacaatgttatatttttcgtaccaactcatttaaatatcataatctaaaatagttctgtaatatgtctagcgctaatatattgatcataatcctgtgcataaattaagatacaacaatgtctcgaaatcatcgacatggcttcttccatagttagaagatcgtcgtcaaagttagcaacgtgattcatcaacatttgctgttttgaggcagcaaatactgaaccgtcgccattcaaccattcataaaaaccatcgtctgaatccattgataatttcttgtactggtttttgagagctcgcatcaatctagcatttctagctcccggattgaaaacagaaagaggatcgtacatccagggtccattttctgtaaatagaatcgtataatgtcccttcaagaagatatcagacgatccacaatcaaagaattggtctccgagtttgtaacaaactgcggactttaacctatacatgataccgtttagcataatttctggtgatacgtcaatcggagtatcatctattagagatctaaagccggtgtaacattctccaccaaacatattcttattctgacgtcgttctacataaaacatcattgctccattaacgataacaggggaatgaacagcactacccatcacattagttcccaatggatcaatgtgtgtaactccagaacatcttccatagcctatgttaggaggagcgaacaccactcttccactattgccatcgaatgccatagaataaatatccttggaattgatagaaatcggactgtcggatgttgtgatcatcttcataggattaacaactatgtatggtgccgcctgaagtttcatatcgtaactgatgccgtttataggtctagccacagaaaccaacgtaggtctaaatccaactatagacaaaatagaagccaatatctgttcctcatctgtcataacttgagagcatccagtatgaataatcttcattagatggggatctaccgcatcatcatcgttacaataaaaaattcccattctaatgttcataattgcttttctaatcatggtatgcatgtttgctctctgaatctctgtggaaattagatctgatacacctgtaatcactatcggattatcctccgtaagacgattaaccaacaacatataattataagactttacttttctaaattcataaagttgctggattaggctataggtgtctccatgtacatacgcgttctcgagcgcaggaagtttaataccgaatagtgccatcagaataggatgaatatagtaattagtttctggttttctataaataaaagacaaatcttgtgaactagacatatcggtaaaatgcatggattggaatcgtgtagtcgacagaagaatatgatgattagatggagagtatattttatctaactctttgagttggtcaccgattctaggactagctcgagaatgaataagtactaaaggatgagtacatttcacagaaacactagcattgttcaatgtgctctttacatgggtaaggagttgaaatagctcgtttctatttgttctgacaatatttagtttattcataatgttaagcatatcctgaatagtaaagttagatgtgtcatacttgttagtagttagatatttagcaattgcattcccatcatttctcaatctcgtactccaatcatgcgtggatgctacttcgtcgatggaaaccatacaatcctttttgataggctgttgagattgatcatttcctgcacgtttaggtttggtacgttgatttctagcccctgcggatataaagtcatcgtctacaatttgggacaatgaattgcatacactacaagacaaagatttatcagaagtgtgaatatgatcttcatctaccaaagaaagagtttgattagtataactagattttagtcctgcgttagatgttaaaaaaacatcgctattgaccacggcttccattatttatattcgtagtttttactcgaaagcgtgattttaatatccaatcttattacttttggaatcgttcaaaacctttgactagttgtagaatttgatctattgccctacgcgtatactcccttgcatcatatacgttcgtcaccagatcgtttgtttcggcctgaagttggtgcatatctctttcaacattcgacatgagatccttaagggccatatcgtctagattttgttgagatgctgctcctggatttggattttgttgtgctgttgtacatactgtaccaccagtaggtgtaggagtacatacagtggccacaataggaggttgagaaagtgtaaccgttggagtagtacaagaaatacttccatccgattgttgtgtacatgtagttgttggtaacgtctgagaaggttgggtagatggcggcgtcgtcgttttttgatctttattaaatttagagataatatcctgaacagcattgctcggcgtcaacgctggaaggagtgaactcgccggcgcatcagtatcttcagacagccaatcaaaaagattagacatatcagatgatgtattagtttgttgtcgtggttttggtgtaggagcagtactactaggtagaagaataggagccgatgtagctgttggaaccggctgtggagttatatgaatagttggttgtagcggttggataggctgtctgctggcggccatcatattatctctagctagttgttctcgcaactgtctttgataatacgactcttgagactttagtcctatttcaatcgcttcatcctttttcgtatccggatccttttcttcagaataatagattgacgactttggtgtagaggattctgccagcctctgtgagaacttgttaaagaagtccatttaaggctttaaaattgaattgcgattataagattaaatggcagacacagacgatattatcgactatgaatccgatgatctcaccgaatacgaggatgatgaagaagaggaagaagatggagagtcactagaaactagtgatatagatcccaaatcttcttataagattgtagaatcagcatccactcatatagaagatgcgcattccaatcttaaacatatagggaatcatatatctgctcttaaacgacgctatactagacgtataagtctatttgaaatagcgggtataatagcagaaagctataacttgcttcaacgaggaagattacctctagtttcagaattttctgacgaaacgatgaagcaaaatatgctacatgtaattatacaagagatagaggagggttcttgtcctatagtcatcgaaaagaacggagaattgttgtcggtaaacgattttgacaaagatggtctaaaattccatctagactatattatcaaaatttggaaacttcaaaaacgatattagaatttatacgaatatcgttctctaaatgtcacaatcaagtctcgcatgttcagcaatttattgtcgtactttatatcgtgttcattaacgatatcttgcaaaatagtaatgattctatcttccttcgatagatattcttcagagattattgtcttatattctttcttgttatcagatatgaatttgataagactttgaacattattgatacccgtctgtttaattttttctacagatattttagttttggcagattctatcgtatctgtcaatagacatccaacatcgacattcgacgtcaattgtctataaatcaacgtataaattttagaaataacattagcgaattgttgtgcgttgatgtcgttattctgaaacagtatgattttaggtagcattttcttaacaaagagaacgtatttattgttactcagttgaacagatgatatatccagattactaacgcatctgattccgtataccaaactttcagaagaaatggtatacaattgtttgtattcattcaatgtctctttttcagaaattagtttagagtcgaatactgcaataattttcaagagatagttttcatcagataagattttatttagtgtagatatgataaaactattgttttgttggagaacttgatacgccgcgttctctgtagtcgacgctctcaaatgggaaacaatctccattatttttttggaatcggatactatatcttcggtatcttgacgcagtctagtatacatagagttaagagagattagagtttgtacattaagcaacatgtctctaaatgtggctacaaacttttcctttttcacatcatctagtttattatataccgatttcacaacggcaccagatttaaggaaccagaatgaaaaactctgataactacaatatttcatcatagttacgattttatcatcttctatagttggtgtaatagcgcatacctttttctccaagactggaaccaacgtcataaaaatgtttaaatcaaaatccatatcaacatctgatgcgctaagaccagtctcgcgttcaagattatctttactaatggtgacgaactcatcgtataaaactctaagtttgtccattatttatttacagatttagttgtttaatttatttgtgctcttccagagttgggatagtatttttctaacgtcggtattatattattaggatctacgttcatatgtatcataatattaatcatccacgttttgataaatctatctttagcttctgaaataacgtatttaaacaaaggagaaaaatatttagctacggcatcagacgcaataacattttttgtaaatgtaacgtatttagacgacagatcttcgttaaaaagttttccatctatgtagaatccatcggttgttaacaccattcccgcgtcagattgaataggagtttgaatagtttgttttggaaatagatccttcaataacttatagttgggtgggaaaaaatcgattttatcactagactctttcttttttactatcattacctcatgaactatttcttgaatgagtatatgtattttctttcctatatcggacgcgttcattggaaaatataccatgtcgttaactataagaatatttttatcctcgtttacaaactgaataatatcagatgtagttcgtaaacgaactatatcatcaccagcacaacatctaactatatgatatccactagtttcctttagccgtttattatcttgttccatattagcagtcattccatcatttaagaaggcgtcaaaaataatagggagaaatgacattttggattctgttacaactttaccaaaattaaggatatacggacttactatctttttctcaacgtcaatttgatgaacacacgatgaaaatgtgcttctatgagattgatcatgtagaaaacaacaagggatacaatatttccgcatatcatgaaatatattaagaaatcccaccttattatatttccccaaaggatccatgcacgtaaacattatgccgttatcattaataaagacttctttctcatcggatctgtaaaagttgttactgatttttttcattccaggatctagataattaataatgatgggttttctattcttattctttgtattttggcatatcctagaccagtaaacagtttccactttggtaaaatcagcagacttttgaacgctattaaacatggcattaatggcaataactaaaaatgtaaaatatttttctatgttaggaatatggtttttcactttaatagatatatggtttttggccaaaatgatagatatttttttatccgaggatagtaaaatattattagtcgccgtctctataaaaatgaagctagtctcgatatccaattttattctagaattgataggagtcgccaaatgtaccttatacgttatatctcccttgatgcgttccatttgtgtatctatatcggacacaagatctgtaaatagttttacgttattaatcatcacggtatcgccgtcgctagataacgctaatgtaccatccaagtcccaaatggagagatttaactgttcatcgtttagaataaaatgattaccggtcatattaataaagtgttcatcgtatctagataacaacgacttataattaatgtccaagtcttgaactcgctgaatgatcttttttaacccagttagttttagattggtacgaaatatattgttaaactttgattctacagtaatgtccaaatctagttgtggaaatacttccatcaacattgtttcaaacttgataatattattatctacatcttcgtacgatccaaattccggaatagatgtatcgcacgctctggccacccagataaccaaaaagtcacacgctccaggatatacattgtataaaaagctatcgttttttagtagggtttttttctgcgtgtatacgaagggattaaaaatagtattatcaacgtaactatattccaaattattcttatgagaatagataataatatcgtccttaatatctaacaaatttcctaaatatccctttaattgagtcattcgaagcgtcaatagaatatgtctcttaactatttccggctgttgtatatttaaatgacttcgtaaaaaataatatatgggcgacttctcatctatgtaatcatatggagtgagatatagggctcgttctacctcctgccccttacccacctgtaataccaattgcggacttactatatatcgcatatttatatcgtggggtaaagtgaaaatctactaccgatgatgtaagtcttacaatgttcgaaccagtaccagatcttaatttggaggcctccgtagaactaggggaggtaaatatagatcaaacaacacctatgataaaggagaatagcggttttatatcccgcagtagacgtctattcgcccatagatctaaggatgatgagagaaaactagcactacgattctttttacaaagactttattttttagatcatagagagattcattatttgttcagatgcgttgacgctgtaaaagacgtcactattaccaaaaaaaataacattatcgtggcgccttatatagcacttttaactatcgcatcaaaaggatgcaaacttacagaaacaatgattgaagcattctttccagaactatataatgaacatagtaagaaatttaaattcaactctcaagtatccatcatccaagaaaaactcggataccagtttggaaactatcacgtttatgattttgaaccgtattactctacagtagctctggctattcgagatgaacattcatctggcatttttaatatccgtcaagagagttatctggtaagttcattatctgaaataacatatagattttatctaattaatctaaaatctgatcttgttcaatggagtgctagtacgggcgctgtaattaatcaaatggtaaatactgtattgattacagtgtatgaaaagttacaactggtcatagaaaatgattcacaatttacatgttcattggctgtggaatcaaaacttccaataaaattacttaaagatagaaatgaattatttacaaaattcattaacgagttaaaaaagaccagttcattcaagataagcaaacgcgataaggatacgctactaaaatattttacttaggactggagttagaatttatagacgactcatttcgtttatcattgttactattattactattactatcattattagtgttggcattattagtattcttcttgtcatcttgttcagaaatatacagcaatgctatacctaatactaaatacattatcatgctcgcaatggctctaacaacaacgaaccaaaatgaatttggtcgtagcttttgttcacaaaaatacataaagaaatgtctacataaatctatggcgccattggctacttgaaatagcgccagtcctcctacagattttaatatagctgtataacatgacatttattcatcatcaaaagagacagagtcaccatctgtcatatttagattttttttcatgtgttcaaagtatcctctactcatttcattataatagtttatcatacttagaattttaggacggatcaatgagtaagacttgactagatcgtcagtagtaatttgtgcatcgtctattctgcatccgcttcgtcgaataatgtatagcatcgctttgagattctccatagctatcaagtctttatacaatgacatggaaatatctgtgaatactttatacttctccaacatcgatgccttaacatcatcgcctactttagcattgaaaatacgttctattgtgtagatggatgtagcaagatttttaaacaacaatgccatcttacacgatgattgcctcaagtctccaatcgtttgtttagaacgattagctacagagtccaatgcttggctgactagcatattattatctttagaaattgtattcttcaatgaggcgtttatcatatctgtgatttcgttagtcatattacagtctgactgggttgtaatgttatccaacatatcacctatggatacggtacacgtaccagcatttgtaataatcctatctaagatgttgtatggcattgcgcagaaaatatcttctcctgtaatatctccactctcgataaatctactcagattattcttaaatgccttattctctggagaaaagatatcagtgtccatcatttcattaatagtatacgcagaaaagataccacgagtatcaattctatccaagatacttatcggttccgagtcacagataatggtttcctctccttcgggagatcctgcatagaaatatctaggacaatagtttctatactgtctgtaactctgataatctctaaagtcactaactgataccatgaaattgagaagatcaaacgctgaagtaattaatttttctgcctcgtttttactacaactagttttcatcaatgtagtgacgatgtattgtttagttacttttggtctaatactgatgatagagatattattgcttcccataatggatcttctagtagtcaccttaaagcccattgatgcgaatagcagatagataaagtcttggtatgactcctttctaatatagtacggactacctttgtcacccaactttatacccacataagccataacaacctctttaatagccgtttcatgaggtttatcagccatgagcctgagtagttggaagaatctcatgaatcccgtctcagaaagtcctatatgcatgatagatttatctttcctgggaaactctcgtatagtcatagatgaaatactctttaaagtttctgaaataagattagtaacagtcttacctccgactactctaggtaacaaacaaactctaataggtgttttctctgcggagataatatcagaaaggatagagcaataagtagtattattgtgattataaagaccgaatacataacaggtagaatttataaacatcatgtcctgaaggtttttagacttgtattcctcgtaatccataccgtcccaaaacatggatttggtaactttgatagccgtagatctttgttccttcgccaacaggttaaagaaattaataaagaatttgttgtttctatttatgtccacaaattgcacgtttggaagcgccacggttacattcactgcagcattttgaggatcgcgagtatgaagtacgatgttattgtttactggtatatctggaaagaaatctaccagtctaggaataagagattgatatcgcatagaaatagtaaagtttataatctcatcatcgaagagcattttgttaccattgtaataaatatccactctgtcatatgtataaatgaagtactgttcaaacatgatgagatgtttatatgttggcatagtagtgagatcgacgtttggtaatggcaatgtattaagattaactccataatgtctagcagcatctgcgatgttataagcgtcgtcaaagcggggtcgatcttgtattgttatatattgtctaacacctataagattatcaaaatcttgtctgcttaatacaccgttaacaatttttgccttgaattcttttattggtgcattaataacatccttatagaggatgttaaacaaataagtgttatcaaagttaagatctggatatttcttttctgctagaacatccattgagtcggagccatctggtttaatataaccaccgataaatctagctctgtattctgtatccgtcaatctaatattaagaaggtgttgagtgaaaggtggaagatcgtaaaagctgtgagtattaatgataggattagtttccgaactaatgttaattggggtattaataatatctatatttccagcgttaagtgtaacattaaacagttttaattcacgtgacgtggtatcaattaaataattaatgcccaatttggatatagcagcctgaagctcatcttgtttagttacggatcctaatgagttattaagcaatatatcgaacggatgaacgaaggttgttttaagttggtcacatactttgtaatctagacatagatgcggaagaacggtagaaactatacgaaataaatattcagagtcctctaattgatcaagagtaactattgacttaataggcatcatttatttagtattaaatgacgaccgtaccagtgacggatatacaaaacgatttaattacagagttttcagaagataattatccatctaacaaaaattatgaaataactcttcgtcaaatgtctattctaactcacgttaacaacgtggtagatagagaacataatgccgccgtagtgtcatctccagaggaaatatcctcacaacttaatgaagatctatttccagatgatgattcaccggccactattatcgaacgagtacaacctcatactactattattgacgatactccacctcctacgtttcgtagagagttattaatatcggaacaacgtcaacaacgagaaaaaagatttaatattacagtatcgaaaaatgctgaagcaataatggaatctagatctatgataacttctatgccaacacaaacaccatccttgggagtagtttatgataaagataaaagaattcagatgttagaggatgaagtggttaatcttagaaatcaacgatctaatacaaaatcatctgataatttagataattttaccaaaatactatttggtaagactccgtacaaatcaacagaagttaataagcgtatagccatcgttaattatgcaaatttgaacgggtcccccttatcagtcgaggacttggatgtttgttcggaggatgaaatagatagaatctataaaacgattaaacaatatcacgaaagtagaaaacgaaaaattatcgtcactaacgtgattattattgtcataaacattatcgagcaggcattgctaaaactcggatttgaagaaatcaaaggactgagtaccgatatcacttcagaaattatcgatgtggagatcggagatgactgcgatgctgtagcatctaaactaggaatcggtaacagtccggttcttaatattgtattgtttatactcaagatattcgttaaacgaattaaaattatttaatttaatacattcccatatccagacaacaatcgtctggattaatctgttcctgtcgtctcataccggacgacatattaatctttttattagtgggcatctttttagatggtttctttttcccagcattaactgagtcgatacctagaagatcgtgattgatctctccgaccattccacgaacttctaattggccgtctctgacggtaccataaactattttaccagcattagtaacagcttggacaatctgaccatccatcgcattgtacgatgtagtagtaactgttgttctacgtctaggagcaccagaagtatttttggagcccttggatgttgatgtagaagaagacgaggattttgattttggtttacatgtaatacattttgaactctttgattttgtatcacatgcgccggcagtcacatctgtttgagaattaagattattgttgcctcctttgacggctgcatctccaccgatttgcgctagtagatttttaagctgtggtgtaatcttattaactgtttcgatataatcatcgtaactgcttctaacggctaaattttttttatccgccatttagaagctaaaaatatttttatttatgcagaagatttaactagattatacaatgaactaatatgatccttttccagattatttacaaacttggtattttttggttctggaggaggcgaatttaaattcggacttggattcggattttgtaagttcttgatcttattatacatcgagtataggatggcgacagtaactgctacacaaataccgatcaaaagaagaataccaatcatttattgacaataacttcactattgatcaagtatgcaatatatcatcttttcactaaataagtagtaataatgattcaacaatgtcgagatatatggacgataataatttagttcatggaaatatcgctatgattggtgtgaatgactccgctaactctgtggggtgcgcagtgctttccccacatagaataaattagcattccgactgtgataataataccaagtataaacgccataatactcaatactttccatgtacgagtgggactggtagacttactaaagtcaataaaggcgaagatacacgaaagaatcaaaagaatgattccagcgattagcacgccggaaaaataatttccaatcataagcatcatgtccatttaactaataaaaattttaaatcgccgaatgaacaaagtggaatataaaccatataaaaacaatagtttgtactgcaaaaataatatctatttttgttttcgaagatatggtaaaattaaatagtagtacacagcatgttataactaacagcagcaacggctcgtaattacttatcatttactagacgaaaaggtggtgggatattttcttgctcaaataatacgaatatatcacccatccattttatgcgatgtttatatactctaatctttaatagatctatagacgacgggtttaccaacaatatagattttatcgattcatctaatttaaacccttccttaaacgtgaatgatctattatctggcataacgatgaccctacctgatgaatcggacaatgtactgggccatgtagaataaattatcaacgaattatcgtctacgaacatttatatcatttgttttaattttaggacgcgaataaatggatataaaatagaaaataacagatattacaaccagtgttatggccgcgcccaaccaggtaggcagttttattttatcttttactacaggttctcctggatgtacgtcaccaacggcggacgtagttctagtacaattagacgtaagttccgcttgggaattttttaacgctaaagagttaacgttaatcgtgcacccaacgtatttacatctagttcgttgaacatcttgattataatataaccattttctatctctagattcgtcagtgcactcatgtaaccaacataccctaggtcctaaatatttatctccggaattagattttggataattcgcgcaccaacaatttctatttcctttatgatcgttacaaaagacgtataatgccgtatccccaaaagtaaaataatcaggacgaataattctaataaactcagaacaatatctcgcatccatatgtttggagcaaatatcggaataagtagacatagccggtttccgttttgcacgtaaccattctaaacaattggggtttccaggatcgtttctacaaaatccagtcatgaaatcgtcacaatgttctgtcttgtaattattattaaatatttttggacagtgtttggtatttgtcttagaacaacattttgccacgctatcactatcgcccaggagataatccttttttataaaatgacatcgttgcccggatgctatataatcagtagcgtgttttaaatccttaatatattcaggagttacctcgttctgataatagattaatgatccaggacgaaatttgaaagaactacatggttctccatgaattaatacatattgtttagcaaattcaggaactataaaactactacaatgatctatcgacataccatctatcaaacaaaacttgggtttaatttctcccggagatgtttcataatagtacgtataactttcttctgcaaacttaacagctctattatattcaggataattaaaacctaattccatatatttgtctcgtatatctgctattcctggtgctattttgattctattaagagtaacagctgcccccattcttaataatcgtcagtatttaaactgttaaatgttggtatatcaacatctaccttatttcccgcagtataaggtttgttgcaggtatactgttcaggaatggttacatttatacttcttctatagtcctgtctttcgatgttcatcacatatgcaaagaacagaataaacaaaataatgtaagaaataatattaaatatctgtgaattcgtaaatacattgattgccataataattacagcagctacaatacacacaatagacattcccacagtgttgccattacctccacgatacatttgagttactaagcaataggtaataactaagctagtaagaggcaatagaaaagatgagataaatatcatcaatatagagattagaggagggctatatagagccaagacgaacaaaatcaaaccgagtaacgttctaacatcattatttttgaagattcccaaataatcattcattcctccataatcgttttgcatcatacctccatctttaggcataaacgattgctgctgttcctctgtaaataaatctttatcaagcactccagcacccgcagagaagtcgtcaagcatattgtaatatcttaaataactcatttatatattaaaaaatgtcactattaaagatggagtataatctttatgccgaactaaaaaaaatgacttgtggtcaacccctaagtctttttaacgaagacggggatttcgtagaagttgaaccgggatcatcctttaagtttctgatacctaagggattttacgcctctccttccgtaaagacgagtctagtattcgagacattaacaacgaccgataataaaatcactagtatcaatccaacaaatgcgccaaagttatatcctcttcaacgcaaagtcgtatctgaagtagtttctaatatgaggaaaatgatcgaatcaaaacgtcctctatacatcactcttcacttggcgtgtggatttggtaagactattaccacgtgttatcttatggctacacacggtagaaaaaccgtcatttgcgtacccaataaaatgttaatacatcaatggaagacacaggtagaggcagtcggattggaacataagatatccatagatggagtaagtagtctattaaaggaactaaagactcaaagtccggatgtattaatagtagtcagtagacatctgacaaacgatgccttttgtaaatatatcaataagcattatgatttgttcatcttggatgaatcacatacgtataatctgatgaacaatacagcagttacaagatttttagcgtattatcctccgatgatgtgttattttttaactgctacacctagaccatctaaccgaatttattgtaacagtattattaatattgccaagttatccaatctaaaaaaaactatctatgcagtagatagtttttttgagccatattccacagataatattagacatatggtaaaacgactagatggaccatctaataaatatcatatatataccgagaagttattatctgtagacgagcctagaaatcaacttattcttgataccctggtagaagaattcaagtcaggaactattaatcgcattttagttattactaaactacgtgaacatatggtattattctacaaacgattattagattttttcggaccagaggttgtatttataggagacgcccaaaatagacgtactccagatatggtcaaatcaatcaaggaactaaatagatttatattcgtatccaccttattttattccggtactggtttagatattcctagtttggattcgttgttcatttgctcggcagtaatcaacaatatgcaaatagagcaattactagggagggtatgtcgagaaacagaactattagataggacggtatatgtatttcctaacacatccatcaaagaaataaagtacatgataggaaatttcatgcaacgaattattagtctgtctgtagataaactaggatttaaacaaaaaagttatcggaaacatcaagaatccgatcccacttctgcatgtacaacatcatccagagaagaacgtgtattaaatagaatatttaactcgcaaaatcgttaagaagtttaagcgacgatccgcatgctgcgcaggccagtgtattacccctcatagtattaatataatccaatgatacttttgtgatgtcggaaatcttaaccaatttagactgacaggcagaacacgtcatgcaatcatcatcgtcatcgataactgtagtcttgggcttctttttgcgactcttcattccggaacgcacattggtgctatccatttaggtagtaaaaaataagtcagaatatgccctataacacgatcgtgcaaaacctggtatatcgtctctatctttatcacaatatagtgtatcgacatttttattattattgacctcgtttatcttggaacatggaatgggaacatttttgttatcaacggccatctttgccttaattccagatgttgtaaaattataactaaacagtctatcatcgacacaaatgaaattcttgtttagacgtttgtagtttacgtatgcggctcgttcgcgtctcattttttcagatattgcaggtactataatattaaaaataagaatgaaataacataggattaaaaataaagttatcatgacttctagcgctgatttaactaacttaaaagaattacttagtctgtacaaaagtttgagattttcagattctgcggctatagaaaagtataattctttggtagaatggggaacatctacttactggaaaataggcgtgcaaaaggtagctaatgtcgagacgtcaatatctgattattatgatgaggtaaaaaataaaccgtttaatattgatccgggctattacattttcttaccggtatattttgggagcgtctttatttattcgaagggtaaaaatatggtagaacttggatctggaaactcttttcaaataccagatgatatgcgaagtgcgtgtaacaaagtattagacagcgataacggaatagactttctgagatttgttttgttaaacaatagatggataatggaagatgctatatcaaaatatcagtctccagttaatatatttaaactagctagtgagtacggattaaacatacccaaatatttagaaattgaaatagaggaagacacattatttgacgacgagttatactctattatagaacgctctttcgatgataaatttccaaaaatatccatatcgtatattaagttgggagaacttagacggcaagttgtagactttttcaaattctcattcatgtatattgagtccatcaaggtagatcgtataggagataatatttttattcctagcgttataacaaaatcaggaaaaaagatattagtaaaagatgtagaccatttaatacgatccaaggttagagaacatacatttgtaaaagtaaaaaagaaaaacacattttccattttatacgactatgatggaaacggaacagaaactagaggagaagtaataaaacgaattatagacactataggacgagactattatgttaacggaaagtatttctctaaggttggtagtgcaggcttaaagcaattgactaataaattagatattaatgagtgcgcaactgtcgatgagttagttgatgagattaataaatccggaactgtaaaacgaaaaataaaaaaccaatcagcatttgatttaagcagagaatgtttgggatatccagaagcggattttataacgttagttaataacatgcggttcaaaatagaaaattgtaaggttgtaaatttcaatattgaaaatactaattgtttaaataacccgagtattgaaactatatatggaaactttaaccagttcgtctcaatctttaatgtcgtcaccgatgtcaaaaaaagattattcgagtgaaataatatgcgcctttgatataggtgcaaaaaatcctgccagaactgttttagaagtcaaggataactccgttagggtattggatatatcaaaattagactggagttctgattgggaaaggcgcatagctaaagatttgtcacaatatgaatacactacagttcttctagaacgtcagcctagaaggtcgccgtatgttaaatttatctattttattaaaggctttttatatcatacatcggctgccaaagttatttgcgtctcgcctgtcatgtctggtaattcatatagagatcgaaaaaagagatcggtcgaagcatttcttgattggatggacacattcggattgcgagactccgttccggatagacgcaaattagacgatgtagcggatagtttcaatttggctatgagatacgtattagataaatggaatactaattatacaccttataataggtgtaaatctagaaattacataaaaaaaatgtaataacgttagtaacgccattatggataatctatttacctttctacatgaaatagaagatagatatgccagaactatttttaactttcatctaataagttgcgatgaaataggagatatatatggtcttatgaaagaacgcatttcctcagaggatatgtttgataatatagtgtataataaagatatacatcctgccattaagaaactagtgtattgcgacatccaacttactaaacacattattaatcagaatacgtatccggtatttaacgattcttcacaagtgaaatgttgtcattatttcgacataaactcagataatagcaatattagctctcgtacagtagagatatttgagagggaaaagtcatctcttgtatcatatattaaaactaccaataagaagagaaaggtcaattacggcgaaataaagaaaactgttcatggaggcactaatgcaaattacttttccggtaaaaagtctgacgagtatctgagtactacagttagatccaacattaatcaaccttggatcaaaaccatctctaagaggatgagagttgatatcattaatcactctatagtaacgcgtggaaaaagctctatattacaaactatagaaattatttttactaatagaacatgtgtgaaaatattcaaggattctactatgcacattattctatccaaggacaaggatgaaaaggggtgtatacacatgattgacaaattattctatgtctattataatttatttctgttgttcgaagatatcatccaaaacgagtactttaaagaagtagctaatgttgtaaaccacgtactcacggctacggcattagatgagaaattattcctaattaagaaaatggctgaacacgatgtttatggagttagcaatttcaaaatagggatgtttaacctgacatttattaagtcgttggatcataccgttttcccctctctgttagatgaggatagcaaaataaagttttttaaggggaaaaagctcaatattgtagcattacgatctctggaggattgtataaattacgtgactaaatccgagaatatgatagaaatgatgaaggaaagatcgactattttaaatagcatagatatagaaacggaatcggtagatcgtctaaaagaattgcttctaaaatgaaaaaaaacactaattcagaaatggatcaacgactagggtataagtttttggtgcctgatcctaaagccggagttttttatagaccgttacatttccaatatgtatcgtattctaattttatattgcatcgattgcatgaaatcttgaccgtcaagcggccactcttatcgtttaagaataatacagaacgaattatgatagaaattagcaatgttaaagtgactcctccagattactcacctataatcgcgagtattaaaggtaagagttatgacgcattagccacgttcactgtaaatatctttaaagaggtaatgaccaaagagggtatatccatcactaaaataagtagttatgagggaaaagattctcatttgataaaaattccgctactaataggatacgggaataaaaatccacttgatacagccaagtatcttgttcctaatgtcataggtggagtctttatcaataaacaatctgtcgaaaaagtaggaattaatctagtagaaaagattacaacatggccaaaatttagggttgttaagccaaactcattcactttctcgttttcctccgtatcccctcctaatgtattaccgacaagatatcgccattacaagatatctctggatatatcacaattggaagcgttgaatatatcatcgacaaagacatttataacggtcaatattgttttgctgtctcaatatttatctagagtgagtctagaattcattagacgtagtttatcatacgatatgcctccagaagttgtctatctagtaaacgcgataatagatagtgctaaacgaattactgaatctattactgactttaatattgatacatacattaatgacctggtggaagctgaacacattaaacaaaaatctcagttaacgatcaacgagttcaaatatgaaatgctgcataactttttacctcatatgaactatacacccgatcaactaaagggattttatatgatatctttactaagaaagtttctctactgtatcttccacacttctagatatccagatagagattcgatggtttgtcatcgcatcctaacgtacggcaaatattttgagacgttggcacatgatgaattagagaattacataggcaacatccgaaacgatatcatgaacaatcacaagaacagaggcacttacgcggtaaacattcatgtactaacaactcccggacttaatcacgcgttttctagcttattgagtggaaagttcaaaaagtcagacggtagttatcgaacacatcctcactattcatggatgcagaatatttctattcctaggagtgttggattttatccggatcaagtaaagatttcaaagatgttttctgtcagaaaataccatccaagtcaatatctttacttttgttcatcagacgttccggaaagaggtcctcaggtaggtttagtatctcaattgtctgtcttgagttccattacaaatatactaacgtctgagtatttggatttggaaaagaaaatttgtgagtatatcagatcatattataaagatgatataagttactttgaaacaggatttccaatcactatagaaaatgctctagtcgcatctcttaatccaaatatgatatgtgattttgtaactgactttagacgtagaaaacggatgggattcttcggtaacttggaggtaggtattactttagttagggatcacatgaatgaaattcgcattaatattggagcgggaagattagtcagaccattcttggttgtggataacggagagctcatgatggatgtgtgtccggagttagaaagcagattagacgacatgacattctctgacattcagaaagagtttccgcatgtcatcgaaatggtagatatagaacaatttacttttagtaacgtatgtgaatcggttcaaaaatttagaatgatgtcaaaggatgaaagaaagcaatacgatttatgtgactttcctgccgaatttagagatggatatgtagcatcttcattagtgggaatcaatcacaattctggacccagagctattcttggatgtgctcaagctaaacaagctatctcttgtctgagctcggatatacgaaataaaatagacaatggaattcatttgatgtatccagagaggccaatcgtgattagtaaggctttagaaacttcaaagattgcggctaattgcttcggccaacatgttactatagcattaatgtcgtacaaaggtatcaatcaagaggatggaattatcatcaaaaaacaatttattcagagaggcggtctcgatattgttacagccaagaaacatcaagtagaaattccattggaaaactttaataacaaagaaagagataggtctaacgcctattcaaaattagaaagtaatggattagttagactgaatgctttcttggaatccggagacgctatggcacgaaatatctcatcaagaactcttgaagatgattttgctagagataatcagattagcttcgatgtttccgagaaatataccgatatgtacaaatctcgcgttgaacgagtacaagtagaacttactgacaaagttaaggtacgagtattaaccatgaaagaaagaagacccattctaggagacaaatttaccactagaacgagtcaaaagggaacagtcgcgtatgtcgcggatgaaacggaacttccatacgacgaaaatggtatcacaccagatgtcattattaattctacatccatcttctctagaaaaactatatctatgttgatagaagttattttaacagccgcatattctgctaagccgtacaacaataagggagaaaaccgacctgtctgttttcctagtagtaacgaaacatccatcgatacatatatgcaattcgctaaacaatgttatgagcattcaaatccgaaattgtccgatgaagaattatcggataaaatcttttgtgaaaagattctctatgatcctgaaacggataagccttatgcatccaaagtattttttggaccaatttattacttgcgtctgaggcatttaactcaggacaaggcaaccgttagatgtagaggtaaaaagacgaagctcattagacaggcgaatgagggacgaaaacgtggaggaggtatcaagttcggagaaatggagagagactgtttaatagcgcatggtgcagccaatactattacagaagttttgaaagattcggaagaagattatcaagatgtgtatgtttgtgaaaattgtggagacatagcagcacaaatcaagggtattaatacatgtcttagatgttcaaaacttaatctctctcctctcttaacaaaaattgataccacgcacgtatctaaagtatttcttactcaaatgaacgccagaggcgtaaaagtcaaattagatttcgaacgaaggcctccttcgttttataaaccattagataaagttgatctcaagccgtcttttctggtgtaatattctagtttggtagtagatacatatcaatatcatcaaattcgagatccgaattataaaatgggcgtggattgttaactatagaatcggacgtctgatattcgaaaatctgtggagtttcaggttttggtggaggtgtaactgctacttgggatactgaagtctgatattcagaaagctgtggatgttctggttcggcatccaccgatggtgtcacatcactaatcggttcggtaacgtctgtggatggaggtgctacttctacagaacctgtagcctcagttgtcaacggagatacatttttaatgcgagaaaatgtataatttggtaatggtttcttatgtggatctgaagaagaggtaagatatctactagaaagataccgatcacgttctagttctcttttgtagaacttaactttttctttctccgcatctagttgatattccaacctcttcacgttactacgttcagattccaattcacgttcgcatgggttacctccgcagtttttacgagcgatttcacgttcagccttcatgcgtctctccctctctctatcgagtttatcagagcagtctttctgaaggcgatcgaactccataaatttctccaacgctttgattgtttccatagatttccgaagttcagcttttaggactgtgattctttttctttcgaattcacagctggatgtacaaccgtttccattaccgccatctctaagtttcttttctagatcggcaacatttcatccccatgccttttacattcctcgagtctactgtcgtcgaaatatcgttccagctccttttcgacatcaataactttagcacgttgtctctcaagctctcttttgtagttatctgattccctggcacgtttaagatcttcatgcaattgagtcagctcttaacttcctctcttgcttcttcgtcatagtacgcgcaatcactgtgagatccattgttaccacgtctacactcggcgagctcgcgtttaagagattcaatttcccgtttgtattggtccatgtttccattgctaccaccattagatttacaggctgctagttgtcgttcgagatcagaaatacgggttttcttggaattgatttcgtcgatgtacttggcatcgaaacacttattaagttctttttccaattctacgattttatttctttcgcgagtcaattccctcctgtagtaactatctgttttgtcagattcacgctctctacgtagactttcttgcaagttactaatttgttccctagcacgtccgagtttagttttatatgctgaatagagttctgattcatcctttgagcagatctctagcgatcgtttaagattcctaattctagtctttagcctatttacctcctcagaagatgttccgttaccgttgcgtttacactcgttaagctgtctatcaagatccatgattctatctctaagacgttgcatctctctttccatatcagcattgctttcattattacgtctgcagtcactcaactgtctttcaatatctgagattctatctctaagacgtcgcatctctctctgtttcggcattggtttcattattacgtttacagtcgttcaactgtctttcaagatctgatattctagattggagtctgctaatctctgtagcattttcacggcattcactcagttgtctttcaagatctgaaattttagattggagtctgctaatctctgtaagatttcctcctccgctctcgatgcagtcggtcaacttattctctagttctctaatacgcgaacgcagtgcatcaacttcttgcgtgtcttcctggttgcgtgtacattcatcgagatctctaacgcgtcgtcgttcttcctcaagttctctgcgtactacagaaagcgtgtccctatcttgttgatatttagcaatttctgattctagagtactgattttgcttacgtagttactaatagttgtcttggccttatcaagatcctccttgtatttgtcgcattccttgatatccctacgaagtctggacagttcccattcgacattacgacgtttatcgatttcagctcggagatcgtcatcgcgttgttttagccacatacgactgagttcaagttctcgttgacaagatccatctacttttccattcctaatagtatccagttccttttctagttctgaacgcatttctcgttccctatcaagcgattctctcaattctcggatagtcttcttatcaatttctaataaatctgaaccatcatctgtcccattttgaatatccctgtgttctttgatctcttttgtaagtcggtcgattctttcggttttataaacagaatccctttccaaagtcctaatcttactgagtttatcactaagttctgcattcaattcggtgagttttctcttggcttcttccaactctgttttaaactctccactatttccgcattcttcctcgcatttatctaaccattcaattagtttattaataactagttggtaatcagcgattcctatagccgttcttgtaattgtgggaacataattaggatcttctaatggattgtatggcttgatagcatcatctttatcattattagggggatggacaaccttaattggttggtcctcatctcctccagtagcgtgtggttcttcaataccagtgttagtaataggcttaggcaaatgcttgtcgtacgcgggcacttcctcatccatcaagtatttataatcgggttctacttcagaatattcttttctaagagacgcgacttcgggagttagtagaagaactctgtttctgtatctatcaacgctggaatcaatactcaagttaaggatagcgaatacctcatcgtcatcatccgtatcttctgaaacaccatcatatgacatttcatgaagtctaacgtattgataaatagaatcagatttagtattaaacagatccttaacctttttagtaaacgcatatgtatattttagatctccagatttcataatatgatcacatgccttaaatgtcagtgcttccatgatataatctggaacactaatgggtgacgaaaaagatacagcaccatatgctacgttgataaataaatctgaaccactaagtagataatgattaatgttaagaaagaggaaatattcagtgtataggtatgtcttggcgtcatatcttgtactaaacacgctaaacagtttgttaatgtgatcaatttccaatagattaattagagcagcgggaataccaacaaacatattaccacatccgtattttctatgaatatcacatatcatgttaaaaaatcttgatagaagagcgaatatctcgtctgacttaatgagtcgtagttcagcagcaacataagtcataactgtaaatagaacatactttcctgtagtgttgattctagactccacatcaacaccattattaaaaatagttttatatacatctttaatctgctctccgttaatcgtcgaacgttctagtatacggaaacactttgatttcttatctgtagttaatgacttagtgatatcacgaagaatattacgaattacatttcttgtttttcttgagagacctgattcagaactcaactcatcgttccatagtttttctacctcagtggcgaaatctttggagtgcttggtacatttttcaataaggttcgtgacctccatttattataaaaaatttattcaaaacttaactacaatcgggtaattataagatcgtagatctcccatgtggcggaatactaccatctatcgcatgtggatggacagtaggtaatggccatgggaacagtaatgtttgcatatttatctttcttgctagtattactgcatattgtcccaatgtttcgatgtgatgttctaacctatcaactgccgctgtatcacaacaatagtgtccgatgaaattaagattatgatccaatgtgtttaatatatgattatcaagtcttatacgatccgcgtcttttttgacaggatcaggttcttctacaggaagaagtttcggcctcttatgatattcatgtctgggaaacggtggtctagggtgaggctccggtatcggagtgggttttggattataatcatcatcgtctatgacatcatcttcgacttcgatatttattttgctatcttgatgatgtcctgtatcagttgcattttcagcactcgactgaatattagcgcattcattgtctattattaccatatttctaaacccaaaatgtatgtgttgaacatcagtactatcgttgatgagtcttatagcatgaattcgcttatcgttatcgggtttatcttctgtcaccttagcaattccttttttattaaactctacataatcatatccatttctattgtttgttctaatataaacgagtatagcatcattgctaaatttttcaatagtatcaaaaacagaatatcctaaaccatataatatatattcaggaacactcaaactaaatgtccaggattctcctaaatacgtaaactttaatagtgcgaaatcattcaaaaatctaccacttatagatagatagtacataaatgcgtatagtagtctacctatctctttattatgaaaaccggcattacgatcatatatgtcgtgatatacctgtgatccgtttacgttaaaccataaatacatgggtgatcctataaacatgaatttatttctaattctcagagctatagttaattgaccgtgtaatatttgcttacatgcatacttgatacgcttattaataagatttttatcattgctcgttatttcagaatcgtatatataaggagtaccatcgtgattcttaccagatattatacaaaatactatatataaaatatattgacccacgttagtaatcatataaatgtttaacgttttaaattttgtattcaatgatccattatcatacgctatcatggtcttgtaatattcattctttaaaatataatattgtgttagccattgcattggagctcctaatggagattttctattctcatccattttaggataggctttcataaagtccctaataacttcgtgaataatgtttctatgttttctactgatgcatgtatttgcttcgatttttttatcccatgtttcatctatcatagatttaaacgcagtaatgctcgcaacattaacatcttgaaccgttggtacaattccgttccataaatttataatgttcgccatttatataactcattttttgaatatacttttaattaacaaaagagttaagttactcatatggacgccgtccagtctgaacatcaatctttttagccagagatatcatagccgctcttagagtttcagcgtgattttccaacctaaatagaacttcatcgttgcgtttacaacacttttctatttgttcaaactttgttgttacattagtaatctttttttccaaattagttagccgttgtttgagagtttcctcattgtcgtcttcatcggctttaacaattgcttcgcgtttagcctctggctttttagcagcctttgtagaaaaaaattcagttgctggaattgcaagatcgtcatctccggggaaaagagttccgtccatttaaagtacagattttagaaactgacactctgcgttatttatatttggtacaacacatggattataaatattgatgttaataacatcagaaaatgtaaagtctatacattgttgcatcgtgttaaattttctaatggatctagtattattgggtccaacttctgcctgaaatccaaatatggaagcggatacaaaaccgtttcctggataaaccacacatctccacttttgctttacatcagaaattgtgtcgttgacatcttgaactctcctatctaatgccggtgttccacctatagattttgaatattcgaatgctgcatgagtagcattaaattccttaatattgccataattttcatatattgagtaaccctggataaaaagtaaacacaccgcagccgtcgctaccacaataaaaaaaattgatagagagttcatttataatctattagaagctgacaaaatttttttacacgcatcagacaatgctttaataaatagttcaacatctacttttgtcatatcgaaccgatggtatgattctaacctagaattacatccgaaaaagttgactatgttcatagtcattaagtcattaacaaacaacattccagactctggattataagacgatactgtttcgtcacaattacctaccttaatcatgtgattatgaatattggctattagagcaccttctaagaaatctataatatctttgaaacacgatttaaaatcaaaccacgaatatacttctacgaagaaagttagtttacccataggagaaataactataaatggagatctaaatacaaaatccggatctatgatagttttaacattattatattctctattaaatacctccacatctaaaaatgttaattttgaaactatgtcttcgtttattaccgtacctgaactaaacgctataagctctattgtttgagaactctttaaacgatattcttgaaatacatgtaacaaagtttcctttaactcggtcggtttatctaccatagttacagaatttgtatccttatctataatataataatcaaaatcgtataaagttatataattatcgcgttcagattgtgatcttttcaaatagactaaaaaccccatttctctagtaagtatcttatgtatatgtttgtaaaatatcttcatggtgggaatatgctctaccgcagttagccattcctcattgacagcggtagatgtattagacaaaactattccaatgtttaacaagggccattttacgagattattaaatccttgtttgataaatgtagccaatgagggttcgagttcaacgacgattgaattctcttcccgcggatgctgcatgatgaacgacgggatgttgttcgattgatttggaattctttttcgactttttgtttatattaaatattttaaaatttatagcggatagcaattcatgtaccacggataatgtagacgcgtattgcgcatcgatatctttattattagataaatttatcaataaatgtgagaagtttgcctcgttaaggtcttccatttaaatattatataaacatttgtgtttgtatcttattcgtcttttatggaatagttttttactagtaaagctgcaattacacactttgtccgtaaaacataaatataaacaccagcttttatcaatcgttccaaaaagtcgacggcggacatttttaacatggcatctattttaaatacacttaggtttttggaaaaaacatcattttataattgtaacgattcaataactaaagaaaagattaagattaaacataagggaatgtcatttgtattttataagccaaagcattctaccgttgttaaatacttgtctggaggaggtatatatcatgatgatttggttgtattggggaaggtaacaattaataatctaaagatgatgctattttacatggatttatcatatcatggagtgacaagtagtggagcaatttacaaattgggatcgtctatcgatagactttctctaaataggactattgttacaaaagttaataattatgatgatacattttttgacgacgatgattgatcgctattgcacaattttgtttttgtactttctaatatagtgtttaggttctttttcatatgagaatattgatttactaaaatatctatgtttaacttttgttctatgacgtccttatcggcggtatcggtacatatacgtaattcaccttcacaaaatacggagtcttcgataataatagccaatcgattattggatctagctgtctgtatcatattcaacatgtttaatatatcctttcgtttcccctttacaggcatcgatcgtagcatattttccgcgtctgatatggaaatgttaaaactacaaaaatgcgtaatgttagcccgtcctaatattggtacgtgtctataagtttggcatagtagaataatagacgtgtttaaatgccttccaaagtttaagaattctattagagtattgcattttgatagtttatcgcctacatcatcaaaaataagtaaaaagtgtgctgattttttatgattttgtgcgacagcaatacatttttctatgttacttttagttcgtatcagattatattctagagattcctgactactaacgaaattaatatgatttggccaaatgtatccatcataatctgggttataaacgggtgtaaacaagaatatatgtttatattttttaactagtgtagaaaacagagatagtaaatagatagtttttccagatccagatcctcctgttaaaaccattctaaacggcatttttaataaattttctcttgaaaattgtttttcttggaaacaattcataattatatttacagttactaaattaatttgataataaatcaaaatatggaaaactaaggttgttagtagggaggagaacaaagaaggcacatcgtgatataaataacatttattatcatgatgacaccagaaaacgacgaagagcagacatctgtgttctccgctactgtttacggagacaaaattcagggaaagaataaacgcaaacgcgtgattggtctatgtattagaatatctatggttatttcactactatctatgattaccatgtccgcgtttctcatagtgcgcctaaatcaatgcatgtctgctaacgaggctgctattactgacgccgctgttgccgttgctgctgcatcatctactcatagaaaggttgcgtctagcactacacaatatgatcacaaagaaagctgtaatggtttatattaccagggttcttgttatatattacattcagactaccagttattctcggatgctaaagcaaattgcactgcggaatcatcaacactacccaataaatccgatgtcttgactacctggctcattgattatgttgaggatacatggggatctgatggtaatccaattacaaaaactacatccgattatcaagattctgatgtatcacaagaagttagaaagtatttttgtgttaaaacaatgaactaatatttatttttgtacattaataaatgaaatcgcttaatagacaaactgtaagtaggtttaagaagttgtcggtgccggccgctataatgatgatactctcaaccattattagtggcataggaacatttctgcattacaaagaagaactgatgcctagtgcttgcgccaatggatggatacaatacgataaacattgttatttagatactaacattaaaatgtctacagataatgcggtttatcagtgtcgtaaattacgagctagattgcctagacctgatactagacatctgagagtattgtttagtattttttataaagattattgggtaagtttaaaaaagaccaatgataaatggttagatattaataatgataaagatatagatattagtaaattaacaaattttaaacaactaaacagtacgacggatgctgaagcgtgttatatatacaagtctggaaaactggttaaaacagtatgtaaaagtactcaatctgtactatgtgttaaaaaattctacaagtgacaacaaaaaatgaattaataataagtcgttaacgtacgccgccatggacgccgcgtttgttattactccaatgggtgtgttgactataacagatacattgtatgatgatctcgatatctcaatcatggactttataggaccatacattataggtaacataaaaactgtccaaatagatgtacgggatataaaatattccgacatgcaaaaatgctactttagctataagggtaaaatagttcctcaggattctaatgatttggctagattcaacatttatagcatttgtgccgcatacagatcaaaaaataccatcatcatagcatgcgactatgatatcatgttagatatagaagataaacatcagccattttatctattcccatctattgatgtttttaacgctacaatcatagaagcgtataacctgtatacagctggagattatcatctaatcatcaatccttcagataatctgaaaatgaaattgtcgtttaattcttcattctgcatatcagacggcaatggatggatcataattgatgggaaatgcaatagtaattttttatcataaaagttgtaaagtaaataataaaacaataaatattgaactagtagtacgtatattgagcaatcagaaatgatgctggtacctcttatcacggtgaccgtagttgcgggaacaatattagtatgttatatattatatatttgtaggaaaaagatacgtactgtctataatgacaataaaattatcatgacaaaattaaaaaagataaagagttctaattccagcaaatctagtaaatcaactgatagcgaatcagactgggaggatcactgtagtgctatggaacaaaacaatgacgtagataatatttctaggaatgagatattggacgatgatagcttcgctggtagtttaatatgggataacgaatccaatgttatggcgcctagcacagaacacatttacgatagtgttgctggaagcacgctgctaataaataatgatcgtaatgaacagactatttatcagaacactacagtagtaattaatgaaacggagactgttgaagtacttaatgaagataccaaacagaatcctaactattcatccaatcctttcgtaaattataataaaaccagtatttgtagcaagtcaaatccgtttattacagaacttaacaataaatttagtgagaataatccgtttagacgagcacatagcgatgattatcttaataagcaagaacaagatcatgaacacgatgatatagaatcatcggtcgtatcattggtgtgattagtttcctttttataaaattgaagtaatatttagtattattgctgccgtcacgttgtacaaatggagatattccctgtattcggcatttctaaaattagcaattttattgctaataatgactgtagatattatatagatacagaacatcaaaaaattatatctgatgagatcaatagacagatggatgaaacggtacttcttaccaacatcttaagcgtagaagttgtaaatgacaatgagatgtaccatcttattcctcatagattatcgacgattatactctgtattagttctgtcggaggatgtgttatctctatagataatgacatcaatggcaaaaatattctaacctttcccattgatcatgctgtaatcatatccccactgagtaaatgtgtcgtagttagcaagggtcctacaaccatattggttgttaaagcggatatacctagcaaacgattggtaacatcgtttacaaacgacatactatatgtaaacaatctgtcactgattaattatttgccgttgtctgtattcattattagacgagtcaccgactatttggatagacacatatgcgatcagatatttgctaataataagtggtattcccttataaccatcgacgataagcaatatcctattccatcaaactgtataggtatgtcctctgccaagtacataaattctagcatcgagcaagatactttaatccatgtttgtaacctcgagcatccgttcgactcagtatacaaaaaaatgcagtcgtacaattctctacctatcaaggaacaaatattgtacggtagaattgataatataaatatgagcattagtatttctgtggattaatagatttctagtatggggatcattaatcatctctaatctctaaatacctcataaaacgaaaaaaaagctattatcaaatactgtacggaatggattcattctcttctctttttatgaaactctgttgtatatctactgataaaactggaagcaaaaaatctgatagaaagaataagaataagatcaaggattatatggaacacgattattataaaataacaatagttcctggttcctcttccacgtctactagctcgtggtattatacacatgcctagtaatagtctctttgcgttgacggaaagcagactagaaataacaggctaaaatgttcagacaccataatagttcccaacccagataataacagagttccatcaacacattcctttaaactcaatcccaaacccaaaaccgttaaaatgtatccggccaattgatagtagataatgaggtgtacagcgcatgataatttacacagtaaccaaaatgaaaatactttagtaattataagaaatatagacggtaatgtcatcatcaacaatccgataatatgcctgagagtaaacattgacggataaaacaaaaatgctccgcataactctatcatggcaataacacaaccaaatacttgtaagattcctaaattagtagaaaatacaacgaatatcgatgtataagtgatctcgagaaataataagaataaagtaatgcccgtaaagataaacatcaacattgtttggtaatcattaaaccaattagtatgaagttgaactaatttcacagtagattttattccagtgttatcctcgcatgtataagtacctggtaagatatctttatattccataatcaatgagacatcactatctgataacgaatgaagtctagcactagtatgccatttacttaatattgtcgtcttggaagttttattataagttaaaatatcatggttatccaatttccatctaatatactttgtcggattatctatagtacacggaataatgatggtatcattacatgctgtatactctatggtctttgtagttgttataacaaccaacgtatagaggtatatcaacgatattctaactcttgacattttttatttatttaaaatgatacctttgttatttattttattctattttgctaacggtattgaatggcataagtttgaaacgagtgaagaaataatttctacttacttattagacgacgtattatacacgggtgttaatggggcggtatacacattttcaaataataaactaaacaaaactggtttaactaataataattatataacaacatctataaaagtagaggatgcggataaggatacattagtatgcggaaccaataacggaaatcccaaatgttggaaaatagacggttcagacgacccaaaacatagaggtagaggatacgctccttatcaaaatagcaaagtaacgataatcagtcacaacggatgtgtactatctgacataaacatatcaaaagaaggaattaaacgatggagaagatttgacggaccatgtggttatgatttattcacggcggataacgtaattccaaaagatggtttacgaggagcattcgtcgataaagacggtacttatgacaaagtttacattcttttcactgatactatcggctcaaagagaattgtcaaaattccgtatatagcacaaatgtgcctaaacgacgaaggtggtccatcatcattgtctagtcatagatggtcgacgtttctcaaagtcgaattagaatgtgatatcgacggaagaagttatagacaaattattcattctagaactataaaaacagataatgatacgatactatatgtattcttcgatagtccttattccaagtccgcattatgtacctattctatgaataccattaaacaatctttttctacgtcaaaattggaaggatatacaaagcaattgccgtctccagctcctggtatatgtttaccagctggaaaagttgttccacataccacgtttgaagtcatagaacaatataatgtactagatgatattataaagcctttatctaaccaacctatcttcgaaggaccgtctggtgttaaatggttcgatataaaggagaaggaaaatgaacatcgggaatatagaatatacttcataaaagaaaattctatatattcgttcgatacaaaatctaaacaaactcgtagctcgcaagtcgatgcgcgactattttcagtaatggtaactgcgaaaccgttatttatagcagatatagggataggagtaggaatgccacaaatgaaaaaaatacttaaaatgtaatcttaatcgagtacaccacacgacaatgaacaaacataagacagattatgctggttatgcttgctgcgtaatatgcggtctaattgtcggaattatttttacagcgacactattaaaagttgtagaacgtaaattagttcatacaccattaatagataaaacgataaaagatgcatatattagagaagattgtcctactgactggataagctataataataaatgtatccatttatctactgatcgaaaaacctgggaggaaggacgtaatgcatgcaaagctctaaattcaaattcggatctaattaagatagagactccaaacgagttaagttttttaagaagccttagacgaggctattgggtaggagaatccgaaatattaaaccagacaaccccatataattttatagctaagaatgccacgaagaatggaactaaaaaacggaaatatatttgtagcacaacgaatactcccaaactgcattcgtgttacactatataacaattacactacatttttatcataccactacttcggttagatgttttagaaaaaaataaatatcgccgtaccgttcttgtttttataaaaataacaattaacaattatcaaattttttctttaatattttacgtggttgaccattcttggtggtaaaataatctcttagtgttggaatggaatgctgtttaatgtttccacactcatcgtatattttgacgtatgtagtcacatcgtttacgcaatagtcagactgtagttctatcatgcttcctacatcagaaggaggaacagttttaaagtctcttggttttaatctattaccgttagttttcatgaaatcctttgttttatccacttcacattttaaataaatgtccactatacattcttttgttaattttactagatcgtcatgggtcatagaatttataggttccgtagtccatggatccaaactagcaaacttcgcgtatacggtatcgcgattagtgtatacaccaactgtatgaaaattaagaaaacagtttaataaatcaacagaaatatttaatcctccgtttgatacagatgcgccatatttatggatttcggattcacacgttgtttgtctgaggtgttcgtctagtgttgcttctacgtaaacttcgattcccatatattctttattgtcagaatcgcataccgatttatcatcatacactgtttgaaaactaaatggtatacacatcaaaataataaataataacgagtacattctgcaatattgttatcgtaattggaaaaatagtgttcgagtgagttggattatgtgagtattggattgtatattttattttatattttgtaataagaataaaatgctaatgtcaagtttattccaatagatgtcttattaaaaacatatataataaataacaatggctgaatggcataaaattatcgaggatatctcaaaaaataataagttcgaggatgccgccatcgttgattacaagactacaaagaatgttctagctgctattcctaacagaacatttgccaagattaatccgggtgaaattattcctctcatcactaatcgtaatattctaaaacctcttattggtcagaaatattgtattgtatatactaactctctaatggatgagaacacgtatgctatggagttgcttactgggtacgcccctgtatctccgatcgttatagcgagaactcataccgcacttatatttttgatgggtaagccaacaacatccagacgtgacgtgtatagaacgtgtagagatcacgctacccgtgtacgtgcaactggtaattaaaataaaaagtaatattcatatgtagtgtcaattttaaatgatgatgatgaaatggataatatccatattgacgatgtcaataatgccggtattggcatacagttcatcgatttttagatttcattcagaggatgtggaattatgttatgggcatttgtattttgataggatctataatgtagtaaatataaaatataatccgcatattccatatagatataattttattaatcgcacgttaaccgtagatgaactagacgataatgtcttttttacacatggttattttttaaaacacaaatatggttcacttaatcctagtttgattgtctcattatcaggaaacttaaaatataatgatatacaatgctcagtaaatgtatcgtgtctcattaaaaatttggcaacgagtacatctactatattaacatctaaacataagacttattctctacatcggtccacgtgtattactataataggatacgattctattatatggtataaagatataaatgacaagtataatgacatctatgattttactgcaatatgtatgctaatagcgtctacattgatagtgaccatatacgtgtttaaaaaaataaaaatgaactcttaattatgctatgctattagaaatggataaaatcaaaattacggttgattcaaaaattggtaatgttgttaccatatcgtataacttggaaaagataactattgatgtcacacctaaaaagaaaaaagaaaaggatgtattattagcgcaatcagttgctgtcgaagaggcaaaagatgtcaaggtagaagaaaaaaatattatcgatattgaagatgacgatgatatggatgtagaaagcgcgtaatacgatctataaaaataagtatataaatactttttatttactgtactcttactgtgtagtggtgataccctactcgattatttttttaaaaaaaaaatacttattctgattcttctagccatttccgtgttcgtttgaatgccacatcgacgtcaaagataggggagtagttgaaatctagttctgcattgttggtacgcacctcaaatgtagtgttggatatcttcaacgtatagttgttgagtagtgatggttttctaaatagaattctcttcatatcattcttgcacgcgtacatttttagcatccatcttggaatcctagatccttgttctattcccaatggtttcatcaatagaagattaaacatatcgtacgaacacgatggagagtaatcgtagcaaaagtaagcatttcctttaatcttagatcccggatactggatatattttgcagccaacacgtgcatccatgcagcatttcctacatatacccggctatgcaccgcgtcatcatcgactgtacgatacataatgttaccgtgttgcttacattgctcgtaaaagactttcatcaatttgtctccttctccgtaaattccagtgggtcttaggcaacaagtatacaattttgctccattcatgattacggaattattggctttcataaccagttgctcggccatacgtttactttttgcgtatacatgtcctggtgatatatcataaagggtatgctcatggccgatgaatggatcaccgtgtttattgggtcctattgcttccatgctactagtatagatcaaatacttgattcctaggtccacacaagctgccaaaatagtctgtgttccataatagtttactttcatgatttcattatcggtgtattttccaaatacatccactagagcagccgtatgaataatcagatttaccccatctagcgcttctctcaccttatcaaagtcgtttatatcacattgtatatagtttataaccttaactttcgaggttattggttgtggatcttctacaatatctatgactctgatttcttgaacatcatctgcactaattaacagttttactatatacctgcctagaaatccggcaccaccagtaaccgcgtacacggccattgctgccactcataatatcagactacttattctattttactaaataatggctgtttgtataatagaccacgataatatcagaggagttatttactttgaaccagtccatggaaaagataaagttttaggatcagttattggattaaaatccggaacgtatagtttgataattcatcgttacggagatattagtcaaggatgtgattccataggcagtccagaaatatttatcggtaacatctttgtaaacagatatggtgtagcatatgtttatttagatacagatgtaaatatatttacaattattggaaaggcgttatctatttcaaaaaatgatcagagattagcgtgtggagttattggtatttcttacataaatgaaaagataatacattttcttacaattaacgagaatggcgtttgatatatcagttaatgcgtctaaaacaataaatgcattagtttacttttctactcagcaaaataaattagtcatacgtaatgaagttaatgatacacactacactgtcgaatttgatagggacaaagtagttgacacgtttatttcatataatagacataatgacaccatagagataagaggggtgcttccagaggaaactaatattggttgcgcggttagtatgacttacttgtataataagtatagttttaaactgattttagcagaatatataagacacagaaatactatatccggcaatatttattcggcattgatgacactagatgatttggctattaaacagtatggagacattgatctattatttaatgagaaacttaaagtagactccgattcgggactatttgactttgtcaactttgtaaaggatatgatatgttgtgattctagaatagtagtagctctatctagtctagtatctaaacattgggaattgacaaataaaaaatataggtgtatggcattagccgaacatatatctgatagtattccaatatctgagctatctagactacgatacaatctatgtaagtatctacgcggacacactgagagcatagaggataaatttgattattttgaagacgatgattcgtctacatgttctgccgtaaccgacagggaaacggatgtataattttttttatagcgtgaaggatatgataaaaaatataattgttgtatttatcccattccaatcaccttatatgattctgtaacacaataaaggagtcttatagatgtatagaggtcagatactggtttgataaactgtttattccacataagtatgtttgactttatggttagacccgcatactttaacaaatcactgaaaattggagttaggtattgacctctcagaatcagttgccgttctggaacattaaatgtattttttatgatatactccaacgcatttatgtgggcatacaacaagtcattactaatggaatattccaagagttttagttgtctagtatttaacaagagaagagatttcaacagactgtttatgaactcgaatgccgcctcattgtcgcttatattgatgatgtcgaattctcccaatatcatcaccgatgagtagctcatcttgttatcgggatccaagttttctaaagatgtcattaaaccctcgatcatgaatggatttatcatcatcgtttttatgttggacatgagcttagtccgtttgtccacatctatagaagatgatttctgaattatttcatatatctctctctttaactccaggaacttgtcaggatggtctactttaatatgttctcgtctaagagatgaaaatctttggatggttgcacgcgacttttctctaaaggatgacgttgcccaagatcctctcttaaatgaatccatcttatccttggacaagatggacagtctattttccttagatggtttaatatttttgttacccatgatctataaaggtagacctaatcgtctcggatgaccatatatttattttcagttttattatacgcataaattgtaaaaaatatgttaggtttacgaaaatgtctcgtggggcattaatcgtttttgaaggattggacaaatctggaaaaacaacacaatgtatgaacatcatggaatcaataccttcaaacacaataaaataccttaactttcctcagagatccactgtcactggaaagatgatagatgactatctaactcgtaaaaaaacctataatgatcatatagttaatctattattttgtgcaaatagatgggagtttgcatcttttatacaagaacaactagaacagggaattactttaatagttgatagatacgcattttctggagtagcgtatgccgccgctaaaggcgcgtcaatgactctcagtaagagttatgaatctggattgcctaaacccgacttagttatattcttggaatctggtagcaaagaaattaatagaaacgtcggtgaggaaatttatgaagatgttacattccaacaaaaggtattacaagaatataaaaaaatgattgaagaaggagatattcattggcaaattatttcttctgaattcgaggaagatgtaaagaaggagttgattaagaatatagttatagaggctatacacacggttactggaccagtggggcaactgtggatgtaatagtgaaattacattttttataaatagatgttagtacagtgttataaatggatgaagcatattactctggcaacttggaatcagtactcggatacgtgtccgatatgcataccgaactcgcatcaatatctcaattagttattgccaagatagaaactatagataatgatatattaaacaaggacattgtaaattttatcatgtgtagatcaaacttggataatccatttatctctttcctagatactgtatatactattatagatcaagagaactatcagactgagttgattaattcattagacgacaatgaaattatcgattgtatagttaataagtttatgagcttttataaggataacctagaaaatatagtagatgctatcattactctaaaatatataatgaataatccagattttaaaactacgtatgccgaagtactcggttccagaatagccgatatagatattaaacaagtgatacgtaagaatatactacaattgtctaataatatccgcgaacgatatttgtgaaaatattaaaaaaaaatactttttttattaaatgacgtcttttcgtgaatttagaaaattatgctgtgctatatatcacgcatcaggatataaagaaaaatctaaattaattagagactttataacagatagggatgataaatatttgatcattaagctattgcttcccggattagacgatagaatttataacatgaacgataaacaaattataaaattatatagtataatatttaaacaatctcaggaagatatgctacaagatttaggatacggatatataggagacactattaggactttcttcaaagagaacacagaaatccgtccacgagataaaagcattttaactttagaagaagtggatagttttttaactacgttatcatccgtaactaaagaatcgcatcaaataaaattattgactgatgtagcatctgtttgtacatgtaatgatttaaaatgtgtagtcatgcttattgataaagatctaaaaattaaagcgggtcctcggtacgtacttaacgctattagtcctaatgcctatgatgtgtttagaaaatctaataacttgaaagagataatagaaaattcatctaaacaaaatctagactctatatctatttctgttatgactccaattaatcccatgttagcggaatcgtgtgattctgtcaataaggcgtttaaaaaatttccatcaggaatgtttgcggaagtcaaatacgatggtgaaagagtacaagttcataaaaataataacgagtttgccttctttagtagaaacatgaaaccagtactctctcataaagtggattatctcaaagaatacataccgaaagcatttaaaaaagctacgtctatcgtattggattctgaaattgttcttgtagacgaacataatgtaccgctcccgtttggaagtttaggtatacacaaaaagaaagaatataaaaactctaacatgtgtttgttcgtgtttgactgtttgtactttgatggattcgatatgacggacattccattgtacgaacgaagatcttttctcaaagatgttatggttgaaatacccaatagaatagtattctcagagttgacgaatattagtaacgagtctcagttaactgacgtattggatgatgcactaacgagaaaattagaaggattggtcttaaaagatattaatggagtatacgaaccgggaaagagaagatggttaaaaataaagcgagactatttgaacgagggttccatggcagattctgccgatttagtagtactaggtgcctactatggtaaaggagcaaagggtggtatcatggcagtctttctaatgggttgttacgacgatgaatccggtaaatggaagacggttaccaagtgttcaggacacgatgataatacgttaagggagttgcaagaccaattaaagatgattaaaattaacaaggatcccaaaaaaattccagagtggttagtagttaataaaatctatattcccgattttgtagtagaggatccgaaacaatctcagatatgggaaatttcaggagcagagtttacatcttccaagtcccataccgcaaatggaatatccattagatttcctagatttactaggataagagaggataaaacgtggaaagaatctactcatctaaacgatttagtaaacttgactaaatcttaatagttacatacaaactgaaaattaaaataacactatttagttggtggtcgccatggatggtgttattgtatactgtctaaacgcgctagtaaaacatggcgaggaaataaatcatataaaaaatgatttcatgattaaaccatgttgtgaaagagtttgtgaaaaagtcaagaacgttcacattggcggacaatctaaaaacaatacagtgattgcagatttgccatatatggataatgcggtatccgatgtatgcaattcactgtataaaaagaatgtatcaagaatatccagatttgctaatttgataaagatagatgacgatgacaagactcctactggtgtatataattattttaaacctaaagatgccattcctgttatcatatctataggaaaggataaagatgtctgtgaactattaatctcatcagacatatcgtgtgcatgcgtggagttaaattcatatcacgtagccattcttcccatggatgtttccttttttaccaaaggaaatgcatcattgattattctcctgtttgatttctctatcgatgcggcacctctcttaagaagtgtaaccgataataatgttattatatctagacaccagcgtctacatgacgagcttccgagttccaattggttcaagttttacataagtataaagtccgactattgttctatattatatatggttgttgatggatctgtgatgcatgcgatagctgataatagaactcacgcaattattagcaaaaatatattagacaatactacgattaacgatgagtgtagatgctgttattttgaaccacagattaggattcttgatagagatgagatgctcaatggatcatcgtgtgatatgaacagacattgtattatgatgaatttacctgatgtaggcgaatttggatctagtatgttggggaaatatgaacctgacatgattaagattgctctttcggtggctggtaatttaataagaaatcgagactacattcccgggagacgaggatatagctactacgtttacggtatagcctctagataatttttttaagcacgaaataaaaaacataattttaaaccaatctatttcatactattttgtgtgatcaccatggacataaagatagatattagtatttctggtgataaatttacggtgactactaggagggaaaatgaagaaagaaaaaaatatctacctctccaaaaagaaaaaactactgatgttatcaaacctgattatcttgagtacgatgacttgttagatagagatgagatgtttactattctagaggaatattttatgtacagaggtctattaggcctcagaataaaatatggacgactctttaacgaaattaaaaaattcgacaatgatgcggaagaacaattcggtactatagaagaactcaagcagaaacttagattaaattctgaagagggagcagataactttatagattatataaaggtacaaaaacaggatatcgtcaaacttactgtatacgattgcatatctatgataggattgtgtgcatgcgtggtagatgtttggagaaatgagaaactgttttctagatggaaatattgtttacgagcgattaaactgtttattgatgatcacatgcttgataagataaaatctatactgcagaatagactagtatatgtggaaatgtcatagaaagttaaaagttaatgagagcaaaaatatataaggttgtattccatatttgttatttttttctgtaatagttagaaaaatacattcgatggtctatctatcagattattatgtgttataaggtactttttctcataataaactagagtatgagtaagatagtgtttttcaaaacatataaatctaaaattgatggatgagatatacagctattaatttcgaaaatatattttaatctgataactttaaacatggatttttaatggtggtttaacgttttaaaaaaagattttgttattgtagtatatgataatattaaaagatggatataaagaatttgctgactgcatgtactattttttacattactacattggctacggcagatatacctacttcgtcactgccacacgctccggtaaacggggcatgtgacgagggagaatatcttgataagaggcataatcaatgttgtaatcagtgtccacctggagaatttgccaaggttagatgtaatggtaacgataacacaaaatgtgaacgctgcccacctcatacatataccgcaatccccaattactctaatggatgtcatcaatgtagaaaatgcccaacaggatcatttgataaggtaaagtgtaccggaacacagaacagtaaatgttcgtgtcttcctggttggtattgcgctactgattcttcacagactgaagattgtcgagattgtataccaaaaaggagatgtccatgcggatactttggtggaatagatgaacaaggaaatcctatttgtaaatcgtgttgtgttggtgaatattgcgactacctacgtaattatagacttgatccatttcctccatgcaaactatctaaatgtaattaattatgattttgatgataatgttaccatacattatatcgctacttggttagtgtattattcagtatgaagacctattaataattacttatcttttgacgatcttgttataattataatataaaaatacttatggcatagtaactcataattgctgacgcgataaattcgtaataatctgttttgttcaaatttttataaggaatctacaggcataaaaataaaaatataatttataatatactcttacagcgcgccatcatgaataacagcagtgaattgattgctgttattaatggatttagaaatagtggacgattttgtgatattaatatagttattaatgatgaaaggataaacgctcacagactcatcctatctggagcctccgaatatttttccattctgttttccaataattttatcgattctaatgaatacgaagttaatctaagtcatttagattatcaaagtgttaacgatttgatcgattacatttatgggatacctttgagcctaactaacgataacgtgaaatatattctttcaaccgctgattttttacaaattggatctgctattacggagtgtgaaaattacatacttaaaaatctttgttctagaaactgtatcgatttctacatatacgctgataaatataataacaagaaaatagaatcagcgtcgtttaacacaatattacaaaatattttgagactcatcaacgatgaaaactttaaatacttaacagaggaatcaatgataaaaattttaagcgatgatatgttaaatataaaaaatgaggatttcgccccactaattctcattaaatggttagagagtactcaacaaccatgcaccgtcgagttacttaaatgcctcagaatatcattgctttccccacaagttataaaatcactttatagtcatcgactggttagttcaatctacgaatgtataacattcttaaacaatatagcattcttggatgaatcatttcctagataccatagcatcgagttgatatctatcggtataagtaattcgcatgataagatttccataaactgctacaatcataaaaaaaatacatgggaaatgatatcttcacgtagatataggtgtagtttcgcagtggccgtcctggataatattatctatatgatgggtggatatgatcagtccccgtatagaagttcaaaggttatagcgtacaatacatgtacaaattcttggatatatgatataccagagctaaaatatcctcgttctaattgtgggggactggctgatgacgaatacatttattgtataggcggcatacgcgatcaggattcatcgttgacatctagtattgatagatggaagccatcaaaaccatattggcagaagtatgctaaaatgcgcgaaccaaaatgtgatatgggggttgcgatgttaaacggattaatatatgttataggtggaatcgttaaaggtgacacgtgtaccgacgcactagagagtttatcagaagatggatggatgaagcatcaacgtcttccaataaaaatgtccaatatgtcgacgattgttcatgatggcaagatttatatatctggaggttacaacaatagtagtgtagttaatgtaatatcgaatctagtccttagctataattcgatatatgatgaatggaccaaattatcatcattaaacattcctagaattaatcccgctctatggtcagcgcataataaattatatgtaggaggaggaatatctgatgatgttcgaactaatacatctgagacatacgacaaagaaaaagattgttggacattggataatggtcacgtgttaccacgcaattatataatgtataaatgcgaaccgattaaacataaatatccattggaaaaaacacagtacacgaatgattttctaaagtatttggaaagttttataggtagttgatagaacaaaatacataattttgtaaaaataaatcactttttatactaatatgacacgattaccaatacttttgttactaatatcattagtatacgctacaccttttcctcagacatctaaaaaaataggtgatgatgcaactctatcatgtaatcgaaataatacaaatgactacgttgttatgagtgcttggtataaggagcccaattccattattcttttagctgctaaaagcgacgtcttgtattttgataattataccaaggataaaatatcttacgactctccatacgatgatctagttacaactatcacaattaaatcattgactgctagagatgccggtacttatgtatgtgcattctttatgacatcaactacaaatgacactgataaagtagattatgaagaatactccacagagttgattgtaaatacagatagtgaatcgactatagacataatactatctggatctacacattcaccggaaactagttctgagaaacctgattatatagataattctaattgctcgtcggtattcgaaatctaagctcttttttttttttttttttttggcatataaataagtcgaccaccatggtgggtgaggatagcgtgctgatcaccgagaacatgcacatgaaactgtacatggagggcaccgtgaacgaccaccacttcaagtgcacatccgagggcgaaggcaagccctacgagggcacccagaccatgaagatcaaggtggtcgagggcggccctctccccttcgccttcgacatcctggctaccagcttcatgtacggcagcaaaacctttatcaaccacacccagggcatccccgacttctttaagcagtccttccctgagggcttcacatgggagaggatcaccacatacgaagacgggggcgtgctgaccgctacccaggacaccagcctccagaacggctgcctcatctacaacgtcaagatcaacggggtgaacttcccatccaacggccctgtgatgcagaagaaaacactcggctgggaggccagcaccgagatgctgtaccccgctgacagcggcctgagaggccatagccagatggccctgaagctcgtgggcgggggctacctgcactgctccctcaagaccacatacagatccaagaaacccgctaagaacctcaagatgcccggcttctacttcgtggacaggagactggaaagaatcaaggaggccgacaaagagacctacgtcgagcagcacgagatggctgtggccaggtactgcgacctgcctagcaaactggggcacagctgattaattaatttttatcgatctaattcaacaatgtctggagagcttcgcaggatcccgactccggaaccaattactgataaagaagatcatacagttacagacactgtctcatacactacagtaagtacatcatctggaattgtcactactaaatcaaccaccgatgatgcggatctttatgatacgtacaatgataatgatacagtaccaccaactactgtaggcggtagtacaacctctattagcaattataaaaccaaggactttgtagaaatatttggtattaccgcattaattatattgtcggccgtggcaattttctgtattacatattatatatataataaacgttcacgtaaatacaaaacagagaacaaagtctagatttttgacttacataaatgtctgggatagtaaaatctatcatattgagcggaccatctggtttaggaaagacagccatagccaaaagactatgggaatatatttggatttgtggtgtcccataccactagatttcctcgtcctatggaacgagaaggtgttgattaccattacgttaacagagaggccatctggaagggaatagccgccggaaactttctagaacatactgagtttttaggaaatatttacggaacttctaaaacagctgtgaatacagcggctattaataatcgtatttgtgtgatggatctaaacatcgacggtgttagaagtcttaaaaatacgtacctaatgccttactcggtgtatataagacctacctctcttaaaatggttgagaccaagcttcgtcgtagaaacactgaagctaacgatgagattcatcgtcgtgtgatgttggcaaaaactgacatggatgaggcaggtgaagccggtctattcgacactattatcattgaagatgatgtgaatttagcatatagtaagttaattcagatactacaggaccgtattagaatgtattttaacactaattagagacttaagacttaaaacttgataattaataatataactcgtttttatatgtgtctatttcaacgtctaatgtattagttaaatattaaaacttaccacgtaaaacttaaaatttaaaatgatatttcattgacagatagatcacacattatgaactttcaaggacttgtgttaactgacaattgcaaaaatcaatgggtcgttggaccattaataggaaaaggtggattcggtagtatttatactactaatgacaataattatgtagtaaaaatagagcccaaagctaacggatcattatttaccgaacaggcattttatactagagtacttaaaccatccgttatcgaagaatggaaaaaatctcacaatataaagcacgtaggtcttatcacgtgcaaggcatttggtctatacaaatccattaatgtggaatatcgattcttggtaattaatagattaggtgcagatctagatgcggtgatcagagccaataataatagactaccaaaaaggtcggtgatgttgatcggaatcgaaatcttaaataccatacaatttatgcacgagcaaggatattctcacggagatattaaagcgagtaatatagtcttagatcaaatagataagaataaattatatctagtggattacggattggtttctaaattcatgtctaatggcgaacatgttccatttataagaaatccaaataaaatggataacggtactctagaatttacacctatagattcgcataaaggatacgttgtatctagacgtggagatctagaaacacttggatattgtatgattagatggttgggaggtatcttaccatggactaagatatctgaaacaaagaattgtgcattagtaagtgccacaaaacagaaatatgttaacaatactgcgactttgttaatgaccagtttgcaatatgcacctagagaattgctgcaatatattaccatggtaaactctttgacatattttgaggaacccaattacgacaagtttcggcacatattaatgcagggtgtatattattaagtgtggtgtttggtcgataaaaattaaaaaataacttaatttattattgatctcgtgtgtacaaccgaaatcatggcgatgttttacgcacacgctctcggtgggtacgacgagaatcttcatgcctttcctggaatatcatcgactgttgccaatgatgtcaggaaatattctgttgtgtcagtttataataacaagtatgacattgtaaaagacaaatatatgtggtgttacagtcaggtgaacaagagatatattggagcactgctgcctatgtttgagtgcaatgaatatctacaaattggaaatccgatccatgatcaagaaggaaatcaaatctctatcatcacatatcgccacaaaaactactatgctctaagcggaatcgggtacgagagtctagacttgtgtttggaaggagtagggattcatcatcacgtacttgaaacaggaaacgctgtatatggaaaagttcaacatgattattctactatcaaagagaaggccaaagaaatgagtgcacttagtccaggacctatcatcgattaccacgtctggataggagattgtatctgtcaagttactgctgtggacgtacatggaaaggaaattatgaaaatgagattcaaaaagggtgcggtgcttccgatcccaaatctggtaaaagttaaacttggggagaatgatacagaaaatctttcttctactatatcggcggcaccatcgaggtaaccacctctctggaagacagcgtgaatcatgtactcatgaaacgtttggaaactatacgccatatgtggtctgttgtatatgatcattttgatattgtgaatggtaaagaatgctgttatgtgcatacgcattcatctaatcaaaatcctataccgagtactgtaaaaacaaatttgtacatgaagactatgggatcatgcattcaaatggattccatggaagctctagagtatcttagcgaactgaaggaatcaggtggatggagtcccagaccagaaatgcaggaatttgaatatccagatggagtggaagacactgaatcaattgagagattggcagaggagttcttcaatagatcagaacttcaggctggtgaatcagtcaaatttggtaattctattaattgttaaacatacatctgtttcagctaagcaactaagaacacgtatacggcagcagcttccttctatactctcatcttttaccaacacaaagggtggatatttgttcattggagttgataataatacacacaaagtatttggattcacggtgggttacgactacctcagactgatagagaatgatatagaaaagcatatcaaaagacttcgtgttgtgcatttctgtgagaagaaagaggacatcaagtacgcgtgtcgattcatcaaggtatataaacctggggatgagactacctcgacatacgtgtgcgctatcaaagtggaaagatgctgttgtgctgtgtttgcagattggccagaatcatggtatatggatactaatggtatcaagaagtattctccagatgaatgggtgtcacatataaaattttaattaatgtaactatagagaacaaataataaggttgtaatatcatatagacaataactaacaattaattagtaactgttatctcttttttaactaaccaactaactatatacctattaatacatcgtaattatagttcttaacatctattaatcattaattcgcttctttaattttttataaactaacattgttaattgaaaagggataacatgttacagaatataaattatatatggatttttttaaaaaggaaatacttgactggagtatatatttatctcttcattatatagcacgcgtgttttccaatttttccacatcccatataatacaggattataatctcgttcgaacatacgagaaagtggataaaacaatagttgattttttatctaggttgccaaatttattccatattttagaatatggggaaaatattctacatatttattctatggatgatgctaatacgaatattataattttttttctagatagagtattaaatattaataagaacgggtcatttatacacaatctcgggttatcatcatccattaatataaaagaatatgtatatcaattagttaataatgatcatccagataataggataagactaatgcttgaaaatggacgtagaacaagacattttttgtcctatatatcagatacagttaatatctatatatgtattttaataaatcatggattttatatagatgccgaagacagttacggttgtacattattacatagatgtatatatcactataagaaatcagaatcagaatcatacaatgaattaattaagatattgttaaataatggatcagatgtagataaaaaagatacgtacggaaacacaccttttatcctattatgtaaacacgatatcaacaacgtggaattgtttgagatatgtttagagaatgctaatatagactctgtagactttaatagatatacacctcttcattatgtctcatgtcgtaataaatatgattttgtaaagttattaatttctaaaggagcaaatgttaatgcgcgtaataaattcggaactactccattttattgtggaattatacacggtatctcgcttataaaactatatttggaatcagacacagagttagaaatagataatgaacatatagttcgtcatttaataatttttgatgctgttgaatctttagattatctattatccagaggagttattgatattaactatcgtactatatacaacgaaacatctatttacgacgctgtcagttataatgcgtataatacgttggtctatctattaaacaaaaatggtgattttgagacgattactactagtggatgtacatgtatttcggaagcagtcgcaaacaacaacaaaataataatggaagtactattgtctaaacgaccatctttgaaaattatgatacagtctatgatagcaattactaaacataaacagcataatgcagatttattgaaaatgtgtataaaatatactgcgtgtatgaccgattatgatactcttatagatgtacagtcgctacagcaatataaatggtatattttaagatgtttcgatgaaatagatatcatgaagagatgttatataaaaaataaaactgtattccaattagttttttgtatcaaagacattaatactttaatgagatacggtaaacatccttctttcgtgaaatgcactagtctcgacgtatacggaagtcgtgtacgtaatatcatagcatctattagatatcgtcagagattaattagtctattatccaagaagctggatcctggagataaatggtcgtgttttcctaacgaaataaaatataaaatattggaaaactttaacgataacgaactatccacatatctaaaaatcttataaacattattaaaatataaaatctaagtaggataaaatcacactacatcattgtttccttttagtgctcgacagtgtatactatttttaacgctcataaataaaaatgaaaacgatttccgttgttacgttgttatgcgtactacctgctgttgtttattcaacatgtactgtacccactatgaataacgctaaattaacgtctaccgaaacatcgtttaatgataaccagaaagttacgtttacatgtgatcagggatatcattctttggatccaaatgctgtctgtgaaacagataaatggaaatacgaaaatccatgcaaaaaaatgtgcacagtttctgattatgtctctgaactatataataaaccgctatacgaagtgaattccaccatgacactaagttgcaacggcgaaacaaaatattttcgttgcgaagaaaaaaatggaaatacttcttggaatgatactgttacgtgtcctaatgcggaatgtcaacctcttcaattagaacacggatcgtgtcaaccagttaaagaaaaatactcatttggggaatatatgactatcaactgtgatgttggatatgaggttattggtgcttcgtacataagttgtacagctaattcttggaatgttattccatcatgtcaacaaaaatgtgatatgccgtctctatctaacggattaatttccggatctacattttctatcggtggcgttatacatcttagttgtaaaagtggttttacactaacggggtctccatcatccacatgtatcgacggtaaatggaatcccatactcccaatatgtgtacgaactaacgaaaaatttgatccagtggatgatggtcccgacgatgagacagatttgagcaaactctcgaaagacgttgtacaatatgaacaagaaatagaatcgttagaagcaacttatcatataatcatagtggcgttgacaattatgggcgtcatatttttaatctccgttatagtattagtttgttcctgtgacaaaaataatgaccaatataagttccataaattgctaccgtaaatataaatccgttaaaataattaataatttaataacaaacaagtatcaaaagattaaagacttatagctagaatcaattgagatgtcttcttcagtggatgttgatatctacgatgccgttagagcatttttactcaggcactattataacaagagatttattgtgtatggaagaagtaacgccatattacataatatatacaggctatttacaagatgcgccgttataccgttcgatgatatagtacgtactatgccaaatgaatcacgtgttaaacaatgggtgatggatacacttaatggtataatgatgaatgaacgcgatgtttctgtaagcgttggcaccggaatactattcatggaaatgtttttcgattacaataaaaatagtatcaacaatcaactaatgtatgatataattaatagcgtatctataattctagctaatgagagatatagaagcgcttttaacgacgatggtatatacatccgtagaaatatgattaacaagttgtacggatacgcatctctaactactattggcacgatcgctggaggtgtttgttattatctgttgatgcatctagttagtttgtataaataattatttcaatatactagttaaaattttaagattttaaatgtataaaaaactaataacgtttttatttgtaataggtgcattagcatcctattcgaataatgagtacactccgtttaataaactgagtgtaaaactctatatagatggagtagataatatagaaaattcatatactgatgataataatgaattggtgttaaattttaaagagtacacaatttctattattacagagtcatgcgacgtcggatttgattccatagatatagatgttataaacgactataaaattattgatatgtataccattgactcgtctactattcaacgcagaggtcacacgtgtagaatatctaccaaattatcatgccattatgataagtacccttatattcacaaatatgatggtgatgagcgacaatattctattactgcagagggaaaatgctataaaggaataaaatatgaaataagtatgatcaacgatgatactctattgagaaaacatactcttaaaattggatctacttatatatttgatcgtcatggacatagtaatacatattattcaaaatatgatttttaaaaatttaaaatatattatcacttcagtgacagtagtcaaataacaaacaacaccatgagatatattataattctcgcagttttgttcattaatagtatacatgctaaaataactagttataagtttgaatccgtcaattttgattccaaaattgaatggactggggatggtctatacaatatatcccttaaaaattatggcatcaagacgtggcaaacaatgtatacaaatgtaccagaaggaacatacgacatatccgcatttccaaagaatgatttcgtatctttctgggttaaatttgaacaaggcgattataaagtggaagagtattgtacgggactatgcgtcgaagtaaaaattggaccaccgactgtaacattgactgaatacgacgaccatatcaatttgtacatcgagcatccgtatgctactagaggtagcaaaaagattcctatttacaaacgcggtgacatgtgtgatatctacttgttgtatacggctaacttcacattcggagattctaaagaaccagtaccatatgatatcgatgactacgattgcacgtctacaggttgcagcatagactttgtcacaacagaaaaagtgtgcgtgacagcacagggagccacagaagggtttctcgaaaaaattactccatggagttcgaaagtatgtctgacacctaaaaagagtgtatatacatgcgcaattagatccaaagaagatgttcccaatttcaaggacaaaatggccagagttatcaagagaaaatttaatacacagtctcaatcttatttaactaaatttctcggtagcacatcaaatgatgttaccacttttcttagcatgcttaacttgactaaatattcataactaatttttattaatgatacaaaaacgaaataaaactgcatattatacactggttaacgcccttataggctctaaccattttcaagatgaggtccctgattatagtccttctgttcccctctatcatctactccatgtctattagacgatgtgagaagactgaagaggaaacatggggattgaaaatagggttgtgtataattgccaaagatttctatcccgaaagaactgattgcagtgttcatctcccaactgcaagtgaaggattgataactgaaggcaatggattcagggatatacgaaacaccgataaattataaaaaaagcaatgtgtccgctgtttccgttaataatactattttcgtaactggcggattattcataaataactctaatagcacgatcgtggttaacaatatggaaaaacttgacatttataaagacaaacaatggtcgattatagaaatgcctatggctagggtatatcacggcattgactcgacatttggaatgttatattttgccggaggtctatccgttaccgaacaatatggtaatttagagaaaaacaacgagatatcttgttacaatcctagaacgaataagtggtttgatatttcatatactatttataagatatccatatcatcattgtgtaaactaaataacgtcttctatgtatttagtaaggacattggatatgtggaaaagtatgatggtgcatggaagttagtacatgatcgtctccccgctataaaggcattatcaacttctccttattgattgaaaatgaaaatataaatagtttttatgtatagcagtattaccctatagttttattgcttactactaacatggatacagatgttacaaatgtagaagatatcataaatgaaatagatagagagaaagaagaaatactaaaaaatgtagaaattgaaaataataaaaacattaacaagaatcatcccaatgaatatattagagaagcactcgttattaataccagtagtaatagtgattccattgataaagaagttatagaatgtatcagtcacgatgtaggaatatagatcatatctactaatttttataatcgatacaaaacataaaaaacaactcgttattacatagcaggcatggaatccttcaagtattgttttgataacgatggcaagaaatggattatcggaaatactttatattctggtaattcaatactctataaggtcagaaaaaatttcactagttcgttctacaattacgtaatgaagatagatcacaaatcacacaagccattgttgtctgaaatacgattctatatatctgtattggatcctttgactatcgacaactggacacgggaacgtggtataaagtatttggctattccagatctgtatggaattggagaaaccgatgattatatgttcttcgttataaagaattcgggaagagtattcgccccaaaggatactgaatcagtcttcgaagcatgcgtcactatgataaacacgttagagtttatacactctcgaggatttacccatggaaaaatagaaccgaggaatatactgattagaaataaacgtctttcactaattgactattctagaactaacaaactatacaagagtggaaactcacatatagattacaacgaggacatgataacttcaggaaatatcaattatatgtgtgtagacaatcatcttggagcaacagtttcaagacgaggagatttagaaatgttgggatattgcatgatagaatggttcggtggcaaacttccatggaaaaacgaaagtagtataaaagtaataaaacaaaaaaaagaatataaaaaatttatagctactttctttgaggactgttttcctgaaggaaatgaacctctggaattagttagatatatagaattagtatacacgttagattattctcaaactcctaattatgacagactacgtaaactgtttatacaagattgaaattatattcttttttttatagagtgtggtagtgttacggatatctaatattaatattagactatctctatcgcgctacacgaccaatatcgattactatggatatcttctatgaaaggagagaatgtatttatttctccagcgtcaatctcgtcagtattgacaatactgtattatggagctaatggatccactgctgaacagctatcaaaatatgtagaaacggaggagaacacggataaggttagcgctcagaatatctcattcaaatccatgaataaagtatatgggcgatattctgccgtgtttaaagattcctttttgagaaaaattggcgataagtttcaaactgttgacttcactgattgtcgcactatagatgcaatcaacaagtgtgtagatatctttactgaggggaaaatcaatccactattggatgaaccattgtctcctagcaattagtgccgtatactttaaagcaaaatggttgacgccattcgaaaaggaatttaccagtgattatcccttttacgtatctccgacggaaatggtagacgtaagtatgatgtctatgtacggcaaggcatttaatcacgcatctgtaaaagaatcattcggcaacttttcaatcatagaactgccatatgttggagatactagtatgatggtcattcttccagacaagattgatggattagaatccatagaacaaaatctaacagatacaaattttaagaaatggtgtgactttatggatgctatgtttatagatgttcacattcccaagtttaaggtaacaggctcgtataatctggtggatactctagtaaagtcaggactgacagaggtgttcggttcaactggagattatagcaatatgtgtaatttagatgtgagtgtcgacgctatgatccacaaaacgtatatagatgtcaatgaagagtatacagaagcagctgcagcaacttctgtactagtggcagactgtgcatcaacaattacaaatgagttctgtgcagatcatccgttcatctatgtgattaggcatgttgatggaaaaattcttttcgttggtagatattgctctccgacaactaattgttaaccattttttttaaaaaaaatagaaaaaacatgtggtattagtgcaggtcgttgttcttccaattgcaattggtaagatgacggccaactttagtacccacgtcttttcaccacagcactgtggatgtgacagactgaccagtattgatgacgtcaaacaatgtttgactgaatatatttattggtcgtcctatgcataccgcaacaggcaatgcgctggacaattgtattccacactcctctcttttagagatgatgcggaattagtgttcatcgacattcgcgagctggtaaaaaatatgccgtgggatgatgtcaaagattgtacagaaatcatccgttgttatataccggatgagcaaaaaaccatcagagagatttcggccatcatcggactttgtgcatatgctgctacttactggggaggtgaagaccatcccactagtaacagtctgaacgcattgtttgtgatgcttgagatgctaaattacgtggattataacatcatattccggcgtatgaattgatgagttgtacatcttgacattttctttcttctcttctccctttcttctcttctcccttcctccctcttctccctttcccagaaacaaacttttttacccactataaaataaaatgagtatactacctattatatttcttcctatatttttttattcttcattcgttcagacttttaacgcgtctgaatgtatcgacaaagggcaatattttgcatcattcatggagttagaaaacgagccagtaatcttaccatgtcctcaaataaatacgctatcatccggatataatatattagatattttatgggaaaaacgaggagcggataatgatagaattataccgatagataatggtagcaatatgctaattctgaacccgacacaatcagactctggtatttatatatgcattaccacgaacgaaacctactgtgacatgatgtcgttaaatttgacaatcgtgtctgtctcagaatcaaatatagatcttatctcgtatccacaaatagtaaatgagagatctactggcgaaatggtatgtcccaatattaatgcatttattgctagtaacgtaaacgcagatattatatggagcggacatcgacgccttagaaataagagacttaaacaacggacacctggaattattaccatagaagatgttagaaaaaatgatgctggttattatacatgtgttttagaatatatatacggtggcaaaacatataacgtaaccagaattgtaaaattagaggtacgggatagaataataccttctactatgcaattaccagatggcattgtaacttcaataggtagtaatttgactattgcatgcagagtatcgttgagacctcccacaacggacaccgacgtcttttggataagtaatggtatgtattacgaagaagatgatggggacggaaacggtagaataagtgtagcaaataaaatctatatgaccgataagagacgtgttattacatcccggttaaacattaatcctgtcaaggaagaagatgctacaacgtttacgtgtatggcgtttactattcctagcatcagcaaaacagttactgttagtataacgtgaatgtatgttgttacatttccatgtcaattgagtttataagaatttttatacattatcttccaacaaacaattgacgaacgtattgctatgattaactcccacgatactatgcatattattaatcattaacttgcagactatacctagtgctattttgacatactcgtgttcttgtgtaattgcggtatctatattattaaagtacgtaaatctagctatagttttattatttaattttagataatataccgtctccttatttttaaaaattgccacatcctttattaaatcatgaatgggaatttctatgtcatcgttagtatattgtgaacaacaagagcagatatctataggaaagggtggaatgcgatacattgatctatgtagttttaaaacacacgcgaactttgaagaatttatataaatcattccatcgatacatccttctatgttgacatgtatatatccaggaattcttttattaatgtcaggaaatgtataaactaaaacattgcccgaaagcggtgcctctatctgcgttatatccgttcttaacttacaaaatgtaaccaatacctttgcatgacttgttttgttcggcaacgttagtttaaacttgacgaatggattaattacaatagcatgatccgcgcatctattaagtttttttactttaacgcccttgtatgtttttacagagactttatctaaatttctagtgcttgtatgtgttataaatataacgggatatagaaccgaatcacctaccttagatacccaattacattttatcagatccagataataaacaaattttgtcgccctaactaattctatattgttatatattttacaattggttatgatatcatgtaataacttggagtctaacgcgcatcgtcgtacgtttatacaattgtgatttagtgtagtatatctacacatgtatttttccgcactatagtattctggactagtgataaaactatcgttatatctgtcttcaatgaactcatcgagatattgctctctgtcatattcatacacctgcataaactttctagacatcttacaatccgtgttattttaggatcatatttacatatttacgggtatatcaaagatgttagattagttaatgggaatcgtctataataatgaatattaaacaattatatgaggacttttaccacaaagcatcataaaaatgagtcgtcgtctgatttatgttttaaatatcaaccgcaaatcaactcataaaatacaagagaatgaaatatatacatattttagtcattgcaatatagaccatacttctacagaacttgattttgtagttaaaaactatgatctaaacagacgacaacctgtaactgggtatactgcactacactgctatttgtataataattactttacaaacgatgtactgaagatattattaaatcatgacgtaaatgtaacgatgaaaaccagtagcggacgtatgcctgtttatatattgcttactagatgttgtaatatttcacatgatgtagtgatagatatgatagacaaagataaaaaccacttattacatagagactattccaacctattactagagtatataaaatctcgttacatgttattgaaggaagaggatatcgatgagaacatagtatccactttattagataagggaatcgatcctaactttaaacaagacggatatacagcgttacattattattatttgtgtctcgcacacgtttataaactaggtgagtgtagaaaaccgataacgataaaaaaggccaagcgaattatttctttgtttatacaacatggagctaatctaaacgcgttagataattgtggtaatacaccattccatttgtatcttagtattgaaatgtgtaataatattcatatgactaaaatgctgttgacttttaatccgaatttcaaaatatgtaataatcatggattaacgcctatactatgttatataacttccgactacatacaacacgatattcttgttatgttaatacatcactatgaaacaaatgttggagaaatgccgatagatgagcgtcgtatgatcgtattcgagtttatcaaaacatattctacacgtccggcagattcgataacttatttgatgaataggtttaaaaatataaatatttatacccgctatgaaggaaagacattattacacgtagcatgtgaatataataatacacaagtaatagattatcttatacgtatcaacggagatataaatgcgttaaccgacaataacaaacacgctacacaactcattatagataacaaagaaaattccccatataccattaattgtttactgtatatacttagatatattgtagataagaatgtgataagatcgttggtggatcaacttccatctctacctatcttcgatataaaatcatttgagaaattcatatcctactgtatacttttagatgacacattttacgataggcacgttaagaatcgcgattctaaaacgtatcgatacgcattttcaaaatacatgtcgtttgataaatacgatggtataataactaaatgtcacgacgaaacaatgttactcaaactgtccactgttctagacactacactatatgcagttttaagatgtcataattcgagaaagttaagaagatacctcaacgagttaaaaaaatataataacgataagtcctttaaaatatattctaatattatgaatgagagataccttaatgtatattataaagatatgtacgtgtcaaaggtatatgataaactatttcctgttttcacagataaaaattgtctactaacattactaccttcagaaattatatacgaaatattatacatgctgacaattaacgatctttataatatatcgtatccacctaccaaagtatagttgtatttttctcatgcgatgtgtgtaaaaaaactgatattatataaatattttagtgccgtataataaagatgacgatgaaaatgatggtacatatatatttcgtatcattattgttattgctattccacagttacgccatagacatcgaaaatgaaatcacagaattcttcaataaaatgagagatactctaccagctaaagactctaaatggttgaatccagcatgtatgttcggaggcacaatgaatgatatagccgctctaggagagccattcagcgcaaagtgtcctcctattgaagacagtcttttatcgcacagatataaagactatgtggttaaatgggagaggctagaaaagaatagacggcgacaggtttctaataaacgtgttaaacatggtgatttatggatagccaactatacatctaaattcagtaaccgtaggtatttgtgcaccgtaactacaaagaatggtgactgtgttcagggtatagttagatctcatattaaaaaacctccttcatgcattccaaaaacatatgaactaggtactcatgataagtatggcatagacttatactgtggaattctttacgcaaaacattataataatataacttggtataaagataataaggaaattaatatcgacgacattaagtattcacaaacgggaaaggaattaattattcataatccagagttagaagatagcggaagatacgactgttacgttcattacgacgacgttagaatcaagaatgatatcgtagtatcaagatgtaaaatacttacggttataccgtcacaagaccacaggtttaaactaatactagatccgaaaatcaacgtaacgataggagaacctgccaatataacatgcactgctgtgtcaacgtcattattgatcgacgatgtactgattgaatgggaaaatccatccggatggcttataggattcgattttgatgtatactctgttttaactagtagaggcggtatcaccgaggcgaccttgtactttgaaaatgttactgaagaatatataggtaatacatataaatgtcgtggacacaactattattttgaaaaaacccttacaactacagtagtattggagtaaatatacaatgcatttttatatacattactgaattattattactgaattattattactgaattattattaattatatcgtatttgtgctatagaatggatgaagatacgcgactatctaggtatttgtatctcaccgatagagaacatataaatgtagactctattaaacagttgtgtaaaatatcagatcctaatgcatgttatagatgtggatgtacggctttacatgagtacttttataattatagatcagtcaacggaaaatacaagtatagatacaacggttactatcaatattattcatctagcgattatgaaaattataatgaatattattatgatagaactggtatgaacagtgagagtgataatatatcaatcaaaacagaatatgaattctatgatgaaacacaagatcaaagtacacaactagtaggttacgacattaaactcaaaaccaatgaggatgattttatggctatgatagatcagtgggtgtccatgattatatagatgaatcaattaataaagtagtatatggaagagagtctcacgtaagatggcgggatatatggcaagaacataatgatggcgtatacagtataggaaaggagtgcatagataatatatacgaagacaaccataccgtagacgaattctacaagatagacagcgtatcagatgtagatgacgcggaacacatatctccgataactaaaaaaccatagaatcagttgatgataatacctacatttctaatcttccgtataccatcaaatacaaaatattcgagcaacaataagtattttttatacctttaaaactgataaataaattttttctagtgatattttggcaagatgagaatcctatttctcatcgctttcatgtatgggtgtgttcactcatatgttaacgcggttgaaaccaaatgtccaaatctagacattgtaacatcttctggagaatttcattgttcaggatgtgtggaacatatgcctgagtttagctatatgtattggttggcaaaggatatgaaatcggacgaggataccaagtttatagaacatctgggtgatggcatcaaagaagatgaaaccgttcgtaccacagatagtggaatcgtcactctacgtaaagtccttcatgtgactgatactaataaatttgataattataggttcacttgtgtcctcgctacgctagatggcatttataaaaagaatgtttgctgaagtagttgtgtgctactatttttatttatgatataatctaatggaattaatttgaattgatatttatccaatactaaagattatattagaatcaaattaatcttttatacgagaaaaaataacgacatacgtcgtcaacaaattaaactttttatttattagttaactagcttatagaacttgctcattgttatgtttctaaaacgggtacggcatataggacaattatccgacgcaccggtttctcttcgtgttctatgccatatattgatgcatgttatgcaaaatatatgagtacacgaatccaataaaccaaagtatctatcgttttgagtaaacaacttcatagcaaattccacattctttttctttacttactctatacacgtcctcgtatttatttagtattttgatgatatccaactcagaaatggttgttgtattattgggtgtatttggagtataggtattattagctatgtaccaatttaccaaccctcttaatattgattgataatcacatcggttatccaattaataactaaattgtagtgtatatatagaccatatatgtttctatttttttgacagttacgtatagtttcagtaagttttgattgttgtattcctgtatctctagataagttagtcatatagtcccttccggcgatacgttttttccaagcccgaaattgattagccaaatgtgtatttatttttgtgatattgatataatatttcggataatgcatactgttagtcttatatcatttggttcatctatgtattgtaatattgttacatgatctatagatgatgtattgattttggcaggatcgaattccatatccgcgactaaacagtgaaaaaaatgtaaatactttttaaattttaaattagtaaaacttttttttattttttatgattccaaaaatactgaatacaaagtcctaaattataaatatggagatcatactaccacaacttattattatgtatacaaggccggtgtaatagatagatatatataattctattacaccggcagacaattaccgaccggtatttgtcgttaccaacataccgtataatatgtaatatacaattccataacccattgacagttgttatacatcaaaattgcaattcttttgattacgatgttataagaatgtagttaattgatgtatgatgttaatgtgtcctctttcctcttataacatcgtaatcaaaaacttttttataatatatacctaataatgtgtcttaatagttctcgtgattcgtcaaacaatcattcttataaaatataataaagcaacgtaaaaacacataaaaataagcgtaactaataagacaatggatatttacgacgataaaggtctacagactattaaactgtttaataatgaatttgattgtataaggaatgacatcagagaattatttaaacatgtaactgattccgatagtatacaacttccgatggaagacaattctgatattatagaaaatatcagaaaaatactatatagacgattaaaaaatgtagaatgtgttgacatcgataacacaataacttttatgaaatacgatccaaatgatgataataagcgtacgtgttctaattgggtacccttaactaataactatatggaatattgtctagtaatatatttggaaacaccgatatgtggaggcaaaataaaattataccaccctacaggaaatataaagtcggataaggatattatgtttgcaaagactctagactttaaatcaacgaaagtgttaactggacgtaaaacaattgccgttctagacatatccgtttcatataatagatcaatgactactattcactacaacgacgacgttgatatagatatacatactgataaaaatggaaaagagttatgttattgttatataacaatagatgatcattacttggttgatgtggaaactataggagttatagtcaatagatctggaaaatgtctgttagtaaataaccatctaggtataggtatcgttaaagataaacgtataagcgatagttttggagatgtatgtatggatacaatatttgacttttctgaagcacgagagttattttcattaactaatgatgataacaggaatatagcatgggacactgataaactagacgatgatacagatatatggactcccgtcacagaagatgattacaaatttctttctagactagtattgtatgcaaaatctcaatcggatactgtatttgactattatgttcttactggtgatacggaaccacccactgtattcattttcaaggtaactagattttactttaatatgccgaaataaaaaatttttgtataatatctagaggtagaggtattgtttagataaatacaaataacatagatacatcgcatacttagcatttttataaatatacataagacatacactttatacatttttgtaaaaatactcataaaaaaatttataaaaattatggcacaaccatatcttgtataggtagtttagttcgtcgagtgaacctataaacagataatagacaacacataataatgcctactaatacaagcataataccgggagatgggatatatgacgttgtagtgtttgggttttctgaacgttgatagtctactaatactacatgctgacatctaatgcctgtataaccatgagagcatctacaatacataccgtcaatatctctagcgtggatacagtcaccgtgtaaacaatatccatctccctctggaccgcataatctgatagctggaatatctgttgtagcgtttgtaatttctggcaatgtcgtttcgatagcgttaccactatcggcgaatgatctgattatcatagcagcgaacaacaacatcagataatttatcaacatttttgatggattctgtgtttatgctgtttctcagtgtgtgtttatgacaagattgggaattttatattattaattcagtaatataaactaataatatattgttaattgtgtaaataatataaaaataacaatacaatattgaatgtgttgctgttaaaaatgtatgtgttaatataatagaataaaataaatgagtatgatcattttagataacgattgattttatcattaccgcttcattcttatattctttgcttacggaacctatatttagaaacatctactaacaattttttatgcttgcattattaatggtatgtaatatgattgattgtgtacgcaataccaatttgttaagtatgaatacggggtacaaacataaattgaaatttaacattatttatttatgatatatatcgttatcgttaggtctataccatggatatctttaaagaactaatcttaaaacaccctgatgaaaatgttttgatttctccagtttccattttatctactttatctattctaaatcatggagcagctggttctacagctgaacaactatcaaaatatatagagaatatgaatgagaatacacccgatgacaataatgatgacatggaggtagatattccgtattgtgcgacactagctaccgcaaataaaatatacggtagcgatagtatcgagttccacgcctccttcctacaaaaaataaaagacgattttcaaactgtaaactttaataatgctaaccaaacaaaggaactaatcaacgaatgggttaagacaatgacaaatggtaaaattaattccttattgactagtccgctatccattaatactcgtatgacagttgttagcgccgtccattttaaagcaatgtggaaatatccattttctaaacatcttacatatacagacaagttttatatttctaagaatatagttaccagcgttgatatgatggtgggtaccgagaataacttgcaatatgtacatattaatgaattattcggaggattctctattatcgatattccatacgagggaaactctagtatggtaattatactaccggacgacatagaaggtatatataacatagaaaaaaatataacagatgaaaaatttaaaaaatggtgtggtatgttatctactaaaagtatagacttgtatatgccaaagtttaaagtggaaatgacagaaccgtataatctggtaccgattttagaaaatttaggacttactaatatattcggatattatgcagattttagcaagatgtgtaatgaaactatcactgtagaaaaatttctacatacgacgtttatagatgttaatgaggagtatacagaagcatcggccgttacaggagtatttacgattaacttttcgatggtatatcgtacgaaggtctacataaaccatccattcatgtacatgattaaagacaccacaggacgtatactttttatagggaaatactgctatccgcaataaatataaacaaatagacttttataaagagtcttcaacgataagtatatcgacatactacttatgctgcgaaagattctgaacgagaacgactatctcaccctcttggatcatatccgcactgctaaatactaaatctccactacactttttatcatcttatgaggaatgattgccttcgtgaaataggaataattagcaccagaatagctatggattattgtggtagagagtgcactattctatgtcgtctactggatgaagatgtgacgtacaaaaaaataaaactagaaattgaaacgtgtcacaacttatcaaaacatatagatagacgaggaaacaatgcgctacattgttacgtctccaataaatgcgatacagacattaagattgttctctcgcggagtcgagagactttgtagaaacaacgaaggattaactccgctaggagtatacagtaagcatagatacgtaaaatctcagattgtgcatctactgatatccagctattcaaattcctctaacgaactcaagtcgaatataaatgatttcgatctgtattcggataatatcgacttacgtctgctaaaatacctaattgtggataaacggatacgtccgtccaagaatacgaattatgcaatcaatggtctcggattggtggatatatacgtaacgacgcctaatccgagaccagaagtattgctatggcttcttaaatcagaatgttacagcaccggttacgtatttcgtacctgtatgtacgacagtgatatgtgtaagaactctcttcattactatatatcgtctcatagagaatctcaatctctatccaaggatgtaattaaatgtttgatcgataacaatgtttccatccatggcagagacgaaggaggatctttacccatccaatactactggtctttctcaaccatagatatagagattgttaaattattattaataaaggatgtggacacgtgtagagtatacgacgtcagccctatattagaggcgtattatctaaacaagcgatttagagtaaccccatataatgtagacatggaaatcgttaatcttcttattgagagacgtcatactcttgtcgacgtaatgcgtagtattacttcgtacgattccagagaatataaccactacatcatcgataacattctaaagagatttagacaacaggatgaatccatcgtacaagccatactgataaactacttacattacggcgatatggtcgttcgatgcatgttagataacggacaacaactatcctctacacgactactttgttaataataatctcgtcgatgtaaacgtcgtaaggtttatcgtggaaaatatggacacgcggctgtaaatcacgtatcgaacaatggccgtctatgtatgtacggtctgatattatcgagatttaataattgcgggtatcactgttatgaaaccatactgatagatgtatttgatatactaagcaagtacatggatgatatagatatgatcgataactctactatattacgcggtcgatgtcaataatatacaatttgcaaagcggttattggaatatggagcgagtatcacgctcgataatcaatacggccatccagaaaagcagttacagaagagaaaacaaaacgaaatcgttgttctacaagatgtctctccctacgacgattactacgtaaaaaagatactagcctactgcctattaagggacgagtcattcgcggaactacatagtaaattctgtttaaacgaggactataaaagtgtatttatgaaaaatatatcattcgataagatagattccatcatcgtgacataagtcgcctcaaagagattcgaatctccgacaccgacctgtatacggtatcacagctatcttaaagccatacattcagacagtcacatttcatttcccatgtacgacgatctcatagaacagtgccatctatcgatggagcgtaaaagtaaactcgtcgacaaagcactcaataaattagagtctaccatcggtcaatctagactatcgtatttgcctccggaaattatgcgcaatatcatctaaacagtatgttgtacggaaagaaccattacaaatattatccatgatagaaagaaaatatctatatgattggagaagtaggaaacaggaacaagacaacgattactacattattaaatcatgaagtccgtattatactcgtatatattgtttctctcatgtataataataaacggaagagatatagcaccgcatgcaccatccgatggaaagtgtaaagacaacgaatacaaacgccataatttgtgtccgggaacatacgcttccagattatgcgatagcaagactaacacacgatgtacgccgtgtggttcgggtaccttcacatctcgcaataatcatttacccgcttgtctaagttgtaacggaagacgcgatcgtgtaacacgactcacaatagaatctgtgaatgctctcccggatattattgtcttctcaaaggatcatccggatgcaaggcatgtgtttcccaaacaaaatgtggaataggatacggagtatccggagacgtcatctgttctccgtgtggtctcggaacatattctcacaccgtctcttccgcagataaatgcgaacccgtacccagaaatacgtttaactatatcgatgtggaaattaacctgtatccagttaacgacacgtcgtgtactcggacgaccactaccggtctcagcgaatccatctcaacgtcggaactaactattactatgaatcataaagactgtaatcccgtatttcgtgatggatacttctccgttcttaataaggtagcgacttcaggtttctttacaggagaaaggtgtgcactctgaatttcgagattaaatgcaataacaaagattcttcctccaaacagttaacgaaagcaaagaatgatactatcatgccgcattcggagacagtaactctagtgggcgacatctatatactatatagtaataccaatactcaagactacgaaactgatacaatctcttatcatgtgggtaatgttctcgatgtcgatagccatatgcccggtagttgcgatatacataaactgatcactaattccaaacccacccactttttatagtaagtttttcacccataaataataaatacaataattaatttctcgtaaaagtagaaaatatattctaatttattgcacggtaaggaagtagaatcataaagaacagtactcaatcaatagcaattatgaaacaatatatcgtcctggcatgcatgtgcctggcggcagctgctatgcctgccagtcttcagcaatcatcctcatcctcctcctcgtgtacggaagaagaaaacaaacatcatatgggaatcgatgttattatcaaagtcacaaagcaagaccaaacaccgaccaatgataagatttgccaatccgtaacggaaattacagagtccgagtcagatccagatcccgaggtggaatcagaagatgattccacatcagtcgaggatgtagatcctcctaccacttattactccatcatcggtggaggtctgagaatgaactttggattcaccaaatgtcctcagattaaatccatctcagaatccgctgatggaaacacagtgaatgctagattgtccagcgtgtccccaggacaaggtaaggactctcccgcgatcactcatgaagaagctcttgctatgatcaaagactgtgaagtgtctatcgacatcagatgtagcgaagaagagaaagacagcgacatcaagacccatccagtactcgggtctaacatctctcataagaaagtgagttacgaagatatcatcggttcaacgatcgtcgatacaaaatgcgtcaagaatctagagtttagcgttcgtatcggagacatgtgcaaggaatcatctgaacttgaggtcaaggatggattcaagtatgtcgacggatcggcatctgaaggtgcaaccgatgatacttcactcatcgattcaacaaaactcaaagcgtgtgtctgaatcgataactctattcatctgaaattggatgagtagggttaatcgaacgattcaggcacaccacgaattaaaaaagtgtaccggacactatattccggtttgcaaaacaaaaatgttcttaactacattcacaaaaagttacctctcgcgacttcttctttttctgtctcaatagtgtgatacgattatgacactattcctattcctattcctatttcctttcagagtatcacaaaaatattaaacctctttctgatggtctcataaaaaaagttttacaaaaatatttttattctctttctctctttgatggtctcataaaaaaagttttacaaaaatatttttattctctttctctctttgatggtctcataaaaaaagttttacaaaaatatttttattctctttctctctttgatggtctcataaaaaaagttttacaaaaatatttttattctctttctctctttgatggtctcataaaaaaagttttacaaaaatatttttattctctttctctctttgatggtctcataaaaaaagttttacaaaaatatttttattctctttctctctttgatggtctcataaaaaaagttttacaaaaatatttttattctctttctctctttgatggtctcataaaaaaagttttacaaaaatatttttattctctttctctctttgatggtctcataaaaaaagttttacaaaaatatttttattctctttctctctttgatggtctcataaaaaaagttttacaaaaatatttttattctctttctctctttgatggtctcataaaaaaagttttacaaaaatatttttattctctttctctctttgatggtctcataaaaaaagttttacaaaaatatttttattctctttctctctttgatggtctcataaaaaagttttacaaaaatatttttattctctttctctctttgatggtctcataaaaaagttttacaaaaatatttttattctctttctctctttgatggtctcataaaaaaagttttacaaaaatatttttattctctttctctctttgatggtctcataa

SEQ ID NO: 18 - DNA, 199504 bp, Artificial Sequence
  Vaccinia virus GLV-1h253 genome
ttatgagaccatcaaagagagaaagagaataaaaatatttttgtaaaactttttttatgagaccatcaaagagagaaagagaataaaaatatttttgtaaaacttttttatgagaccatcaaagagagaaagagaataaaaatatttttgtaaaacttttttatgagaccatcaaagagagaaagagaataaaaatatttttgtaaaactttttttatgagaccatcaaagagagaaagagaataaaaatatttttgtaaaactttttttatgagaccatcaaagagagaaagagaataaaaatatttttgtaaaactttttttatgagaccatcaaagagagaaagagaataaaaatatttttgtaaaactttttttatgagaccatcaaagagagaaagagaataaaaatatttttgtaaaactttttttatgagaccatcaaagagagaaagagaataaaaatatttttgtaaaactttttttatgagaccatcaaagagagaaagagaataaaaatatttttgtaaaactttttttatgagaccatcaaagagagaaagagaataaaaatatttttgtaaaactttttttatgagaccatcaaagagagaaagagaataaaaatatttttgtaaaactttttttatgagaccatcaaagagagaaagagaataaaaatatttttgtaaaactttttttatgagaccatcaaagagagaaagagaataaaaatatttttgtaaaactttttttatgagaccatcaaagagagaaagagaataaaaatatttttgtaaaactttttttatgagaccatcagaaagaggtttaatatttttgtgatactctgaaaggaaataggaataggaataggaatagtgtcataatcgtatcacactattgagacagaaaaagaagaagtcgcgagaggtaactttttgtgaatgtagttaagaacatttttgttttgcaaaccggaatatagtgtccggtacacttttttaattcgtggtgtgcctgaatcgttcgattaaccctactcatccaatttcagatgaatagagttatcgattcagacacacgctttgagttttgttgaatcgatgagtgaagtatcatcggttgcaccttcagatgccgatccgtcgacatacttgaatccatccttgacctcaagttcagatgattccttgcacatgtctccgatacgaacgctaaactctagattcttgacgcattttgtatcgacgatcgttgaaccgatgatatcttcgtaactcactttcttatgagagatgttagacccgagtactggatgggtcttgatgtcgctgtctttctcttcttcgctacatctgatgtcgatagacacttcacagtctttgatcatagcaagagcttcttcatgagtgatcgcgggagagtccttaccttgtcctggggacacgctggacaatctagcattcactgtgtttccatcagcggattctgagatggatttaatctgaggacatttggtgaatccaaagttcattctcagacctccaccgatgatggagtaataagtggtaggaggatctacatcctcgactgatgtggaatcatcttctgattccacctcgggatctggatctgactcggactctgtaatttccgttacggattggcaaatcttatcattggtcggtgtttggtcttgctttgtgactttgataataacatcgattcccatatgatgtttgttttcttcttccgtacacgaggaggaggatgaggatgattgctgaagactggcaggcatagcagctgccgccaggcacatgcatgccaggacgatatattgtttcataattgctattgattgagtactgttctttatgattctacttccttaccgtgcaataaattagaatatattttctacttttacgagaaattaattattgtatttattatttatgggtgaaaaacttactataaaaagtgggtgggtttggaattagtgatcagtttatgtatatcgcaactaccgggcatatggctatcgacatcgagaacattacccacatgataagagattgtatcagtttcgtagtcttgagtattggtattactatatagtatatagatgtcgcccactagagttactgtctccgaatgcggcatgatagtatcattctttgctttcgttaactgtttggaggaagaatctttgttattgcatttaatctcgaaattcagagtgcacacctttctcctgtaaagaaacctgaagtcgctaccttattaagaacggagaagtatccatcacgaaatacgggattacagtctttatgattcatagtaatagttagttccgacgttgagatggattcgctgagaccggtagtggtcgtccgagtacacgacgtgtcgttaactggatacaggttaatttccacatcgatatagttaaacgtatttctgggtacgggttcgcatttatctgcggaagagacggtgtgagaatatgttccgagaccacacggagaacagatgacgtctccggatactccgtatcctattccacattttgtttgggaaacacatgccttgcatccggatgatcctttgagaagacaataatatccgggagagcattcacagattctattgtgagtcgtgttacacgatcgcgtcttccgttacaacttagacaagcgggtaaatgattattgcgagatgtgaaggtacccgaaccacacggcgtacatcgtgtgttagtcttgctatcgcataatctggaagcgtatgttcccggacacaaattatggcgtttgtattcgttgtctttacactttccatcggatggtgcatgcggtgctatatctcttccgtttattattatacatgagagaaacaatatatacgagtataatacggacttcatgatttaataatgtagtaatcgttgtcttgttcctgtttcctacttctccaatcatatagatattttctttctatcatggataatatttgtaatggttctttccgtacaacatactgtttagatgatattgcgcataatttccggaggcaaatacgatagtctagattgaccgatggtagactctaatttattgagtgctttgtcgacgagtttacttttacgctccatcgatagatggcactgttctatgagatcgtcgtacatgggaaatgaaatgtgactgtctgaatgtatggctttaagatagctgtgataccgtatacaggtcggtgtcggagattcgaatctctttgaggcgacttatgtcacgatgatggaatctatcttatcgaatgatatatttttcataaatacacttttatagtcctcgtttaaacagaatttactatgtagttccgcgaatgactcgtcccttaataggcagtaggctagtatcttttttacgtagtaatcgtcgtagggagagacatcttgtagaacaacgatttcgttttgttttctcttctgtaactgcttttctggatggccgtattgattatcgagcgtgatactcgctccatattccaataaccgctttgcaaattgtatattattgacatcgaccgcgtaatatagtagagttatcgatcatatctatatcatccatgtacttgcttagtatatcaaatacatctatcagtatggtttcataacagtgatacccgcaattattaaatctcgataatatcagaccgtacatacatagacggccattgttcgatacgtgatttacagccgcgtgtccatattttccacgataaaccttacgacgtttacatcgacgagattattattaacaaagtagtcgtgtagaggatagttgttgtccgttatctaacatgcatcgaacgaccatatcgccgtaatgtaagtagtttatcagtatggcttgtacgatggattcatcctgttgtctaaatctctttagaatgttatcgatgatgtagtggttatattctctggaatcgtacgaagtaatactacgcattacgtcgacaagagtatgacgtctctcaataagaagattaacgatttccatgtctacattatatggggttactctaaatcgcttgtttagataatacgcctctaatatagggctgacgtcgtatactctacacgtgtccacatcctttattaataataatttaacaatctctatatctatggttgagaaagaccagtagtattggatgggtaaagatcctccttcgtctctgccatggatggaaacattgttatcgatcaaacatttaattacatccttggatagagattgagattctctatgagacgatatatagtaatgaagagagttcttacacatatcactgtcgtacatacaggtacgaaatacgtaaccggtgctgtaacattctgatttaagaagccatagcaatacttctggtctcggattaggcgtcgttacgtatatatccaccaatccgagaccattgattgcataattcgtattcttggacggacgtatccgtttatccacaattaggtattttagcagacgtaagtcgatattatccgaatacagatcgaaatcatttatattcgacttgagttcgttagaggaatttgaatagctggatatcagtagatgcacaatctgagattttacgtatctatgcttactgtatactcctagcggagttaatccttcgttgtttctacaaagtctctcgactccgcgagagaacaatcttaatgtctgtatcgcatttattggagacgtaacaatgtagcgcattgtttcctcgtctatctatatgttttgataagttgtgacacgtttcaatttctagttttatttttttgtacgtcacatcttcatccagtagacgacatagaatagtgcactctctaccacaataatccatagctattctggtgctaattattcctatttcacgaaggcaatcattcctcataagatgataaaaagtgtagtggagatttagtatttagcagtgcggatatgatccaagagggtgagatagtcgttctcgttcagaatctttcgcagcataagtagtatgtcgatatacttatcgttgaagactctttataaaagtctatttgtttatatttattgcggatagcagtatttccctataaaaagtatacgtcctgtggtgtctttaatcatgtacatgaatggatggtttatgtagaccttcgtacgatataccatcgaaaagttaatcgtaaatactcctgtaacggccgatgcttctgtatactcctcattaacatctataaacgtcgtatgtagaaatttttctacagtgatagtttcattacacatcttgctaaaatctgcataatatccgaatatattagtaagtcctaaattttctaaaatcggtaccagattatacggttctgtcatttccactttaaactttggcatatacaagtctatacttttagtagataacataccacaccattttttaaatttttcatctgttatatttttttctatgttatatataccttctatgtcgtccggtagtataattaccatactagagtttccctcgtatggaatatcgataatagagaatcctccgaataattcattaatatgtacatattgcaagttattctcggtacccaccatcatatcaacgctggtaactatattcttagaaatataaaacttgtctgtatatgtaagatgtttagaaaatggatatttccacattgctttaaaatggacggcgctaacaactgtcatacgagtattaatggatagcggactagtcaataaggaattaattttaccatttgtcattgtcttaacccattcgttgattagttcctttgtttggttagcattattaaagtttacagtttgaaaatcgtcttttattttttgtaggaaggaggcgtggaactcgatactatcgctaccgtatattttatttgcggtagctagtgtcgcacaatacggaatatctacctccatgtcatcattattgtcatcgggtgtattctcattcatattctctatatattttgatagttgttcagctgtagaaccagctgctccatgatttagaatagataaagtagataaaatggaaactggagaaatcaaaacattttcatcagggtgttttaagattagttctttaaagatatccatggtatagacctaacgataacgatatatatcataaataaataatgttaaatttcaatttatgtttgtaccccgtattcatacttaacaaattggtattgcgtacacaatcaatcatattacataccattaataatgcaagcataaaaaattgttagtagatgtttctaaatataggttccgtaagcaaagaatataagaatgaagcggtaatgataaaatcaatcgttatctaaaatgatcatactcatttattttattctattatattaacacatacatttttaacagcaacacattcaatattgtattgttatttttatattatttacacaattaacaatatattattagtttatattactgaattaataatataaaattcccaatcttgtcataaacacacactgagaaacagcataaacacagaatccatcaaaaatgttgataaattatctgatgttgttgttcgctgctatgataatcagatcattcgccgatagtggtaacgctatcgaaacgacattgccagaaattacaaacgctacaacagatattccagctatcagattatgcggtccagagggagatggatattgtttacacggtgactgtatccacgctagagatattgacggtatgtattgtagatgctctcatggttatacaggcattagatgtcagcatgtagtattagtagactatcaacgttcagaaaacccaaacactacaacgtcatatatcccatctcccggtattatgcttgtattagtaggcattattatgtgttgtctattatctgtttataggttcactcgacgaactaaactacctatacaagatatggttgtgccataatttttataaatttttttatgagtatttttacaaaaatgtataaagtgtatgtcttatgtatatttataaaaatgctaagtatgcgatgtatctatgttatttgtatttatctaaacaatacctctacctctagatattatacaaaaattttttatttcggcatattaaagtaaaatctagttaccttgaaaatgaatacagtgggtggttccgtatcaccagtaagaacataatagtcaaatacagtatccgattgagattttgcatacaatactagtctagaaagaaatttgtaatcatcttctgtgacgggagtccatatatctgtatcatcgtctagtttatcagtgtcccatgctatattcctgttatcatcattagttaatgaaaataactctcgtgcttcagaaaagtcaaatattgtatccatacatacatctccaaaactatcgcttatacgtttatctttaacgatacctatacctagatggttatttactaacagacattttccagatctattgactataactcctatagtttccacatcaaccaagtaatgatcatctattgttatataacaataacataactcttttccatttttatcagtatgtatatctatatcaacgtcgtcgttgtagtgaatagtagtcattgatctattatatgaaacggatatgtctagaacggcaattgttttacgtccagttaacactttcgttgatttaaagtctagagtctttgcaaacataatatccttatccgactttatatttcctgtagggtggtataattttattttgcctccacatatcggtgtttccaaatatattactagacaatattccatatagttattagttaagggtacccaattagaacacgtacgcttattatcatcatttggatcgtatttcataaaagttattgtgttatcgatgtcaacacattctacattttttaatcgtctatatagtatttttctgatattttctataatatcagaattgtcttccatcggaagttgtatactatcggaatcagttacatgtttaaataattctctgatgtcattccttatacaatcaaattcattattaaacagtttaatagtctgtagacctttatcgtcgtaaatatccattgtcttattagttacgcttatttttatgtgtttttacgttgctttattatattttataagaatgattgtttgacgaatcacgagaactattaagacacattattaggtatatattataaaaaagtttttgattacgatgttataagaggaaagaggacacattaacatcatacatcaattaactacattcttataacatcgtaatcaaaagaattgcaattttgatgtataacaactgtcaatgggttatggaattgtatattacatattatacggtatgttggtaacgacaaataccggtcggtaattgtctgccggtgtaatagaattatatatatctatctattacaccggccttgtatacataataataagttgtggtagtatgatctccatatttataatttaggactttgtattcagtatttttggaatcataaaaaataaaaaaaagttttactaatttaaaatttaaaaagtatttacatttttttcactgtttagtcgcggatatggaattcgatcctgccaaaatcaatacatcatctatagatcatgtaacaatattacaatacatagatgaaccaaatgatataagactaacagtatgcattatccgaaatattatatcaatatcacaaaaataaatacacatttggctaatcaatttcgggcttggaaaaaacgtatcgccggaagggactatatgactaacttatctagagatacaggaatacaacaatcaaaacttactgaaactatacgtaactgtcaaaaaaatagaaacatatatggtctatatatacactacaatttagttattaattggataaccgatgtgattatcaatcaatattaagagggttggtaaattggtacatagctaataatacctatactccaaatacacccaataatacaacaaccatttctgagttggatatcatcaaaatactaaataaatacgaggacgtgtatagagtaagtaaagaaaaagaatgtggaatttgctatgaagttgtttactcaaaacgatagatactttggtttattggattcgtgtactcatatattttgcataacatgcatcaatatatggcatagaacacgaagagaaaccggtgcgtcggataattgtcctatatgccgtacccgttttagaaacataacaatgagcaagttctataagctagttaactaataaataaaaagtttaatttgttgacgacgtatgtcgttattttttctcgtataaaagattaatttgattctaatataatctttagtattggataaatatcaattcaaattaattccattagattatatcataaataaaaatagtagcacacaactacttcagcaaacattctttttataaatgccatctagcgtagcgaggacacaagtgaacctataattatcaaatttattagtatcagtcacatgaaggactttacgtagagtgacgattccactatctgtggtacgaacggtttcatcttctttgatgccatcacccagatgttctataaacttggtatcctcgtccgatttcatatcctttgccaaccaatacatatagctaaactcaggcatatgttccacacatcctgaacaatgaaattctccagaagatgttacaatgtctagatttggacatttggtttcaaccgcgttaacatatgagtgaacacacccatacatgaaagcgatgagaaataggattctcatcttgccaaaatatcactagaaaaaatttatttatcagttttaaaggtataaaaaatacttattgttgctcgaatattttgtatttgatggtatacggaagattagaaatgtaggtattatcatcaactgattctatggttttatgtattctatcatgtttcactattgcgttggaaataatatcatatgcttccacatatattttattttgttttaactcataatactcacgtaattctggattattggcatatctatgaataattttagctccatgatcagtaaatattaatgagaacatagtattaccacctaccattatttttttcatctcattcaattcttaattgcaaagatctatataatcattatagcgttgacttatggactctggaatcttagacgatgtacagtcatctataatcatggcatatttaatacattgttttatagcatagtcgttatctacgatgttagatatttctctcaatgaatcaatcacacaatctaatgtaggtttatgacataatagcattttcagcagttcaatgtttttagattcgttgatggcaatggctatacatgtatatccgttatttgatctaatgttgacatctgaaccggattctagcagtaaagatactagagattgtttattatatctaacagccttgtgaagaagtgtttctcctcgtttgtcaatcatgttaatgtctttaagataaggtaggcaaatgtttatagtactaagaattgggcaagcataagacatgtcacaaagacccttttttgtatgtataagtgtaaaaattataacatccatagttggatttacataggtgtccaatcgggatctctccatcatcgagataattgatggcatctcccttccttttttagtagatatttcatcgtgtaagaatcaatattaatatttctaaagtatccgtgtatagcctctttatttaccacagctccatattccactagagggatatcgccgaatgtcatatactcaattagtatatgttggaggacatccgagttcattgttttcaatatcaaagagatggtttccttatcatttctccatagtggtacaatactacacattattccgtgcggctttccattttccaaaaacaatttgaccaaatctaaatctacatctttattgtatctataatcactatttagataatcagccataattcctcgagtgcaacatgttagatcgtctatatatgaataagcagtgttatctattcctttcattaacaatttaacgatgtctatatctatatgagatgacttaatataatattgaagagctgtacaatagtttttatctataaaagacggcttgattccgtgattaattagacatttaacaacttccggacgcacatatgctctcgtatccgactctgaatacagatgagagatgatatacagatgcaatacggtaccgcaatttcgtagttgataatcatcatacgcgtatcagtactcgtcctcataaagaacactgcagccattttctatgaacaaatcaataattttagaaacaggatcattgtcattacataattttctataactgaacgatggttttcacatttaacactcaagtcaaatccatgttctaccaacacctttatcaagtcaacgtctacatttttggatttcatatagctgaatatattaaagttatttatgttgctaaatccagtggcttctagtagagccatcgctatatccttattaactttaacatgtctactatttgtgtattcttctaatggggtaagctgtctccaatttttgcgtaatggattagtgccactgtctagtagtagtttgacgacctcgacattattacaatgctcattaaaaaggtatgcgtgtaaagcattattcttgaattggttcctggtatcattaggatctctgtctttcaacatctgtttaagttcatcaagagccacctcctcattttccaaatagtcaaacattttgactgaatgagctactgtgaactctatacacccacacaactaatgtcattaaatatcatgtcaaaaacttgtacaattattaataaaaataatttagtgtttaaattttaccagttccagattttacacctccgttaatacctccattaaccccactggacgatcctcctccccacattccaccgccaccagatgtataagttttagatcctttattactaccatcatgtccatggataaagacactccacatgccgccactaccccctttagaagacatattaataagacttaaggacaagtttaacaataaaattaatcacgagtaccctactaccaacctacactattatatgattatagtttctatttttacagtaccttgactaaagtttctagtcacaagagcaatactaccaacctacactattatatgattatagtttctatttttataggaacgcgtacgagaaaatcaaatgtctaatttctaacggtagtgttgataaacgattgttatccgcggatacctcctctatcatgtcgtctattttcttactttgttctattaacttattagcattatatattatttgattataaaacttatattgcttattagcccaatctgtaaatatcggattattaacatatcgtttctttgtaggtttatttaacatgtacatcactgtaagcatgtccttaccatttattttaatttgacgcatatccgcaatttctttttcgcagtcggttataaattctatatatgatggatacatgctacatgtgtacttataatcgactaatatgaagtacttgatacatattttcagtaacgatttattattaccacctatgaataagtacctgtgatcgtctaggtaatcaactgttttcttaatacattcgatggttggtaatttactcagaataatttccaatatcttaatatataattctgctatttctgggatatatttatctgccagtataacacaaatagtaatacatgtaaacccatattttgttattatattaatgtctgcgccattatctattaaccattctactaggctgacactatgcgactcaatacaatgataaagtatactacatccatgtttatctattttgtttatatcatcaatatacggcttacaaagttttagtatcgataacacatccaactcacgcatagagaaggtagggaataatggcataatatttattaggttatcatcattgtcattatctacaactaagtttccattttttaaaatatactcgacaactttaggatctctattgccaaatttttgaaaatatttatttatatgcttaaatctatataatgtagctccttcatcaatcatacatttaataacattgatgtatactgtatgataagatacatattctaacaatagatcttgtatagaatctgtatatcttttaagaattgtggatattaggatattattacataaactattacacaattctaaaatataaaacgtatcacggtcgaataatagttgatcaactatataattatcgattttgtgatttttcttcctaaactgtttacgtaaatagttagatagaatattcattagttcatgaccactatagttactatcgaataacgcgtcaaatatttcccgtttaatatcgcatttgtcaagataataatagagtgtggtatgttcacgataagtataataacgcatctctttttcgtgtgaaattaaatagtttattacgtccaaagatgtagcataaccatcttgtgacctagtaataatataataatagagaactgttttacccattctatcatcataatcagtggtgtagtcgtaatcgtaatcgtctaattcatcatcccaattataatattcaccagcacgtctaatctgttctattttgatcttgtatccatactgtatgttgctacatgtaggtattcctttatccaataatagtttaaacacatctacattgggatttgatgttgtagcgtatttttctacaatattaataccatttttgatactatttatttctatacctttcgaaattagtaatttcaataagtctatattgatgttatcagaacatagatattcgaatatatcaaaatcattgatatttttatagtcgactgacgacaataacaaaatcacaacatcgtttttgatattattatttttcttggtaacgtatgcctttaatggagtttcaccatcatactcatataatggatttgcaccactttctatcaatgattgtgcactgctggcatcgatgttaaatgttttacaactatcatagagtatcttatcgttaaccatgattggttgttgatgctatcgcattttttggtttctttcatttcagttatgtatggatttagcacgtttgggaagcatgagctcatatgatttcagtactgtagtgtcagtactattagtttcaataagatcaatctctagatctatagaatcaaaacacgataggtcagaagataatgaatatctgtaggcttcttgttgtactgtaacttctggttttgttagatggttgcatcgtgctttaacgtcaatggtacaaattttatcctcgctttgtgtatcatattcgtccctactataaaattgtatattcagattatcatgcgatgtgtatacgctaacggtatcaataaacggagcacaccatttagtcataaccgtaatccaaaaatttttaaagtatatcttaacgaaagaagttgtgtcattgtctacggtgtatggtactagatcctcataagtgtatatatctagagtaatgtttaatttattaaatggttgataatatggatcctcgtgacaatttccgaagatggaaataagacataaacacgcaataaatctaattgcggacatggttactccttaaaaaaatacgaataatcaccttggctatttagtaagtgtcatttaacactatactcatattaatccatggactcataatctctatacgggattaacggatgttctatatacggggatgagtagttctcttctttaactttatactttttactaatcatatttagactgatgtatgggtaatagtgtttgaagagctcgttctcatcatcagaataaatcaatatctctgtttttttgttatacagatgtattacagcctcatatattacgtaatagaacgtgtcatctaccttattaactttcaccgcatagttgtttgcaaatacggttaatcctttgacctcgtcgatttccgaccaatctgggcgtataatgaatctaaactttaattgcttgtaatcattcgaaataatttttagtttgcatccgtagttatcccctttatgtaactgtaaatttctcaacgcgatatctccattaataatgatgtcgaattcgtgctgtatacccatactgaatggatgaacgaataccgacggcgttaatagtaatttactttttcatctttacatattgggtactagttttactatcataagtttataaattccacaagctactatggaataagccaaccatcttagtataccacacatgtcttaaagtttattaattaattacatgttgttttatatatatcgctacgaatttaaagagaaattagtttaggaagaaaaattatctatctacatcatcacgtctctgtattctacgatagagtgctactttaagatgcgacagatccgtgtcatcaaatatatactccattaaaatgattattccggcagcgaacttgatattggatatatcacaacctttgttaatatctacgacaatagacagcagtcccatggttccataaacagtgagtttatctttctttgaagagatattttgtagagatcttataaaactgtcgaatgacatcgcatttatatctttagctaaatcgtatatgttaccatcgtaatatctaaccgcgtctatcttaaacgtttccatcgctttaaagacgtttccgatagatggtctcatttcatcagtcatactgagccaacaaatataatcgtgtataacatctttgatagaatcagactctaaagaaaacgaatcggctttattatacgcattcatgataaacttaatgaaaaatgtttttcgttgtttaagttggatgaatagtatgtcttaataattgttattatttcattaattaatatttagtaacgagtacactctataaaaacgagaatgacataactaatcataactagttatcaaagtgtctaggacgcgtaattttcatatggtatagatcctgtaagcattgtctgtattctggagctattttctctatcgcattagtgagttcagaatatgttataaatttaaatcgaataacgaacataactttagtaaagtcgtctatattaactcttttattttctagccatcgtaataccatgtttaagatagtatattctctagttactacgatctcatcgttgtctagaatatcacatactgaatctacatccaattttagaaattggtctgtgttacatatctcttctatattattgttgatgtattgtcgtagaaaactattacgtagaccattttctttataaaacgaatatatagtactccaattatctttaccgatatatttgcacacataatccattctctcaatcactacatctttaagattttcgttgttaagatatttggctaaactatataattctattagatcatcaacagaatcagtatatatttttctagatccaaagacgaactctttggcgtcctctataatattcccagaaaagatattttcgtgttttagtttatcgagatctgatctgttcatatacgccatgattgtacggtacgttatgataaccgcataaaataaaaatccattttcatttttaaccaatactattcataattgagattgatgtaatactttgttactttgaacgtaaagacagtacacggatccgtatctccaacaagcacgtagtaatcaaatttggtgttgttaaacttcgcaatattcatcaatttagatagaaacttatactcatcatctgttttaggaatccatgtattattaccactttccaacttatcattatcccaggctatgtttcgtccatcatcgttgcgcagagtgaataattcttttgtattcggtagttcaaatatatgatccatgcatagatcggcaaagctattgtagatgtgatttttcctaaatctaatataaaactcgtttactagcaaacactttcctgatttatcgaccaagacacatatggtttctaaatctatcaagtggtggggatccatagttatgacgcagtaacatatattattacattcttgactgtcgctaatatctaaatatttattgttatcgtattggattctgcatatagatggcttgtatgtcaaagatatagaacacataaccaatttatagtcgcgctttacattctcgaatctaaagttaagagatttagaaaacattatatcctcggatgatgttatcactgtttctggagtaggatatattaaagtctttacagatttcgtccgattcaaataaatcactaaataatatcccacattatcatctgttagagtagtatcattaaatctattatattttatgaaagatatatcactgctcacctctatatttcgtacatttttaaactgtttgtataatatctctctgatacaatcagatatatctattgtgtcggtagacgataccgttacatttgaattaatggtgttccattttacaacttttaacaagttgaccaattcatttctaatagtatcaaactctccatgattaaatattttaatagtatccattttatatcactacggacacaaagtagctgacataaaccattgtataatttttatgttttatgtttattagcgtacacattttggaagttccggcttccatgtatttcctggagagcaagtagatgatgaggaaccagatagtttatatccgtacttgcacttaaagtctacattgtcgttgtatgagtatgatcttttaaacccgctagacaagtatccgtttgatattgtaggatgtggacatttaacaatctgacacgtgggtggatcggaccattctcctcctgaacacaggacactagagttaccaatcaacgaatatccactattgcaactataagttacaacgctcccatcggtataaaaatcctcgtatccgttatgtcttccgttggatatagatggaggggattggcatttaacagattcacaaataggtgcctcgggattccataccatagatccagtagatcctaattcacaatacgatttagattcaccgatcaactgatatccgctattacaagagtacgttatactagagccaaagtctactccaccaatatcaagttggccattatcgatatctcgaggcgatgggcatctccgtttaatacattgattaaagagtgtccatccagtacctgtacatttagcatatataggtcccattttttgctttctgtatccaggtagacatagatattctatagtgtctcctatgttgtaattagcattagcatcagtctccacactattcttaaatttcatattaatgggtcgtgacggaatagtacagcatgatagaacgcatcctattcccaacaatgtcaggaacgtcacgctctccaccttcatatttatttatccgtaaaaatgttatcctggacatcgtacaaataataaaaagcccatatatgttcgctattgtagaaattgtttttcacagttgctcaaaaacgatggcagtgacttatgagttacgttacactttggagtctcatctttagtaaacatatcataatattcgatattacgagttgacatatcgaacaaattccaagtatttgattttggataatattcgtattttgcatctgctataattaagatataatcaccgcaagaacacacgaacatctttcctacatggttaaagtacatgtacaattctatccatttgtcttccttaactatatatttgtatagataattacgagtctcgtgagtaattccagtaattacatagatgtcgccgtcgtactctacagcataaactatactatgatgtctaggcatgggagacttttttatccaacgatttttagtgaaacattccacatcgtttaatactacatatttctcatacgtggtataaactccacccattacatatatatcatcgtttacgaataccgacgcgcctgaatatctaggagtaattaagtttggaagtcttatccatttcgaagtgccgtgtttcaaatattctgccacacccgttgaaatagaaaattctaatcctcctattacatataactttccatcgttaacacaagtactaacttctgattttaacgacgacatattagtaaccgttttccattttttcgttttaagatctacccgcgatacggaataaacatgtctattgttaatcatgccgccaataatgtatagacaattatgtaaaacatttgcattatagaattgtctatctgtattaccgactatcgtccaatattctgttctaggagagtaatgggttattgtggatatataatcagagtttttaatgactactatattatgttttataccatttcgtgtcactggctttgtagatttggatatagttaatcccaacaatgatatagcattgcgcatagtattagtcataaacttgggatgtaaaatgttgatgatatctacatcgtttggatttttatgtatccactttaataatatcatagctgtaacatcctcatgatttacgttaacgtcttcgtgggataagatagttgtcagttcatcctttgataattttccaaattctggatcggatgtcaccgcagtaatattgttgattatttctgacatcgacgcattatatagttttttaattccatatcttttagaaaagttaaacatccttatacaatttgtgaaattaatattatgaatcatagtttttacacatagatctactacaggcggaacatcaattattatggcagcaactagtatcatttctacattgtttatggtgatgtttatcttcttccagcgcatatagtctaatagcgattcaaacgcgtgatagtttataccattcaatataatcgcttcatcctttagatggtgatcctgaatgcgtttaaaaaaattatacggagacgccgtaataatttccttattcacttgtataatttccccattgatagaaaatattacgctttccattcttaaagtactataagtaattatagtataatgtaaacgtttatatattcaatatttttataaaaatcattttgacattaattcctttttaaatttccgtctatcatctatagaaacgtattctatgaatttataaaatgcttttacgtgtcctatcgtaggcgatagaaccgctaaaaagcctatcgaatttctacaaaagaatctgttatatggtatagggagagtataaaacattaaatgtccgtacttattaaagtattcagtagccaatcctaactctttcgaatacttattaatggctcttgttctgtacgaatctatttttttgaacaacggacctagtggtatatcttgttctatgtatctaaaataatgtctgactagatccgttagtttaatatccgcagtcatcttgtctagaatggcaaatctaactgcgggtttaggctttagtttagtttctatatctacatctatgtctttatctaacaccaaaaatataatagctaatattttattacaatcatccggatattcttctacgatctcactaactaatgtttctttggttatactagtatagtcactatcggacaaataaagaaaatcagatgatcgatgaataatacatttaaattcatcatctgtaagatttttgagatgtctcattagaatattattagggttagtactcattatcattcggcagctattacttattttattatttttcaccatatagatcaatcattagatcatcaaaatatgtttcaatcatcctaaagagtatggtgaatgactcttcccatctaatttctgaacgttcaccaatgtctctagccactttggcactaatagcgatcattcgcttagcgtcttctatattattaactggttgatttaatctatctagcaatggaccgtcggacagcgtcattctcatgttcttaatcaatgtacatacatcgccgtcatctaccaattcatccaacaacataagctttttaaaatcatcattataataggtttgatcgttgtcatttctccaaagaatatatctaataagtagagtcctcatgcttagttaacaactattttttatgttaaatcaattagtacaccgctatgtttaatacttattcatattttagtttttaggattgagaatcaatacaaaaattaatgcatcattaattttagaaatacttagtttccacgtagtcaatgaaacatttgaactcatcgtacaggacgttctcgtacaggacgtaactataaaccggtttatatttgttcaagatagatacaaatccgataactttttttacgaattctacgggatccactttaaaagtgtcataccgggttctttttatttttttaaacagatcaatggtgtgatgttgattaggtcttttacgaatttgatatagaatagcgtttacatattctccataatggtcaatcgccatttgttcgtatgtcataaattctttaattatatgacactgtgtattatttagttcatccttgttcattgttaggaatctatccaaaatggcaattatactagaactataggtgcgttgtatacacatattgatgtgtctgtttatacaatccatgatatttggatccatgctactaccttcgggtaaaattgtagcatcatataccatttctagtactttaggttcattattatccattgcagaggacgtcatgatcgaatcataaaaaaatatattatttttatgttattttgttaaaaataatcatcgaatacttcgtaagatactccttcatgaacataatcagttacaaaacgtttatatgaagtaaagtatctacgatttttacaaaagtccggatgcataagtacaaagtacgcgataaacggaataataatagatttatctagtctatctttttctatagctttcatagttagatacatggtctcagaagtaggattatgtaacatcagcttcgataaaatgactgggttatttagtcttacacattcgctcatacatgtatgaccgttaactacagagtctacactaaaatgattgaacaatagatagtctaccattgtttcgtattcagatagtacagcgtagtacatggcatcttcacaaattatatcattgtctaatagatatttgacgcatcttatggatcccacttcaacagccatcttaaaatcatattgctttcctttatcattaataatttctagaacatcatctctatcataaaagatacaaatattaactgtttgatccgtaataacattgctagtcaatagcaatttgttaataagatgcgctgggctcaatgtcttaataagaagtgtaagaggactatctccgaatttgttttgtttattaacatccgttgatggaagtaaaagatctataatgtctacattcttgactgttttagagcatacaatatggagaggtgtatttccatcatgatctggttttgagggactaattcctagtttcatcatccatgagattgtagaagcttttggattgtctgacataagatgtctatgaatatgatttttgccaaatttatccactatcctggcttcgaatccgatggacattatttttttaaacactctttctgaaggatctgtacacgccaacaacggaccacatccttcttcatcaaccgagttgttaatcttggctccatactgtaccaataaatttattctctctatgacttcatcatctgttcccgagagataatatagaggtgttttatgctgtttatcacacgcgtttggatctgcgccgtgcgtcagcagcatcgcgactattctattattattaattttagaagctatatgcaatggataatttccatcatcatccgtctcatttggagagtatcctctatgaagaagttcttcgacaaatcgttcatctagtcctttaattccacaatacgcatgtagaatgtgataattatttccagaaggttcgatagcttgtagcatattcctaaatacatctaaatttttactattatatttggcataaagagatagataatactcggccgacataatgttgtccattgtagtataaaaattaatatttctatttctatttctgtatatttgcaacaatttactctctataacaaatatcataacttagtttttttatgtcaagaaggcactggtttagttcatctataaatgtcacgccataactaccacgcatgccatactcagaattatgataaagatatttatccttggggtgtaggtaatggggattaatctttgttggatcagtctctaagttaacacatgtcacacatgatccatttatagttatatcacacgatgatgatttatgaattgattccggaagatcgctatcgtattttgtggttccacaattcatttccatacatgttattgtcacactaatattatgatgaactttatctagccgctgagtggtaaacaacagaacagatagtttattatctttaccaacaccctcagccgctgccacaaatctctgatccgtatccatgatggtcatgtttatttctagtccgtatccagtcaacactatgttagcatttctgtcgatatagctttcactcatatgacactcaccaataatagtagaattaatgtcgtaatttacaccaatagtgagttcggcggcaaagtaccaataccggtaatcttgtcgaggaggacatatagtattcttgtattctaccgaatacccgagagatgcgatacaaaagagcaagactaatttgtaaaccatcttactcaaaatatgtaacaatagtacgatgcaatgagtaagacaataggaaatctatcttatatacacataattattctatcaattttaccaattagttagtgtaatgttaacaaaaatgtgggagaatctaattagtttttctttacacaattgacgtacatgagtctgagttccttgtttttgctaattatttcatccaatttattattcttgacgatatcgagatcttttgtataggagtcaaacttgtattcaacatgcttttctataatcattttagctatttcggcatcatccaatagtacattttccagattagcagaatagatattaatgtcgtatttgaacagagcctgtaacatctcaatgtctttattatctatagccaatttaatgtccggaatgaagagaagggaattattggtgtttgtcgacgtcatatagtcgagcaagagaatcatcatatccacgtgtccattttttatagtgatgtgaatacaactaaggagaatagccagatcaaaagtagatggtatctctgaaagaaagtaggaaacaatacttacatcattaagcatgacggcatgataaaatgaagttttccatccagttttcccatagaacatcagtctccaatttttcttaacaaacagttttaccgtttgcatgttaccactatcaaccgcataatacaatgcggtgtttcccttgtcatcaaattgtgaatcatccagtccactgaatagcaaaatctttactattttggtatcttccaatgtggctgcctgatgtaatggaaattcattctctagaagatttttcaatgctccagcgttcaacaacgtacatactagacgcacgttattatcagctattgcataatacaaggcactatgtccatggacatccgccttaaatgtatctttactagagagaaagcttttcagctgcttagacttccaagtattaattcgtgacagatccatgtctgaaacgagacgctaattagtgtatattttttcattttttataattttgtcatattgcaccagaattaataatatctttaatagatctgattagtagatacatggctatcgcaaaacaacatatacacatttaataaaaataatatttattaagaaaattcagatttcacgtacccatcaatataaataaaataatgattccttacaccgtacccatattaaggagattccaccttacccataaacaatataaatccagtaatatcatgtctgatgatgaacacaaatggtgtattaaattccagtttttcaggagatgatctcgccgtagctaccataatagtagatgcctctgctacagttccttgttcgtcgacatctatctttgcattctgaaacattttataaatatataatgggtccctagtcatatgtttaaacgacgcattatctggattaaacatactaggagccatcatttcggctatcgacttaatatccctcttattttcgatagaaaatttagggagtttaagattgtacactttattccctaattgagacgaccaatagtctaattttgcagccgtgatagaatctgtgaaatgggtcatattatcacctattgccaggtacatactaatattagcatccttatacggaaggcgtaccatgtcatattctttgtcatcgattgtgattgtatttccttgcaatttagtaactacgttcatcatgggaaccgttttcgtaccgtacttattagtaaaactagcattgcgtgttttagtgatatcaaacggatattgccatatacctttaaaatatatagtattaatgattgcccatagagtattattgtcgagcatattagaatctactacattagacataccggatctacgttctactatagaattaattttattaaccgcatctcgtctaaagtttaatctatataggccgaatctatgatattgttgataatacgacggtttaatgcacacagtattatctacgaaactttgataagttagatcagtgtacgtatatttagatgttttcagcttagctaatcctgatattaattctgtaaatgctggacccagatctctttttctcaaatccatagtcttcaataattctattctagtattacctgatgcaggcaatagcgacataaacatagaaaacgaataaccaaacggtgagaagacaatattatcatcttgaatatttttatacgctactataccggcattggtaaatccttgtagacgataggcggacgctgaacacgctaacgatagtatcaataacgcaatcatgattttatggtattaataattaaccttatttttatgttcggtataaaaaaattattgatgtctacacatccttttgtaattgacatctatatatccttttgtataatcaactctaatcactttaacttttacagttttccctaccagtttatccctatattcaacatatctatccatatgcatcttaacactctctgccaagatagcttcagagtgaggatagtcaaaaagataaatatatagagcataatcattctcgtatactctgccctttattacatcacccgcattgggcaacgaataacaaaatgcaagcatcttgttaacgggctcgtaaattgggataaaaattatgtttttattgtcttatatctattttattcaagagaatattcaggaatttctttttccggttgtatctcgtcgcagtatatatcatttgtacattgtttcatattttttaatagtttacaccttttagtaggactagtatcgtacaattcatagctgtattttgaattccaatcacgcataaaaatatcttccaattgttgacgaagacctaatccatcatccggtgtaatattaatagatgctccacatgtatccgtaaagtaatttcctgtccaatttgaggtacctatataggccgttttatcggttaccatatatttggcatggtttaccctagaatacggaatgggaggatcagcatctggtacaataaatagctttacttctatatttatgtttttagattttagcatagcgatagatcttaaaaagtttctcatgataaacgaagatcgttgccagcaactaatcaatagcttaacggatacttgtctgtctatagcggatcttcttaattcatcttctatataaggccaaaacaaaattttacccgccttcgaataaataatagggataaagttcataacagatacataaacgaatttactcgcatttctaatacatgacaataaagcggttaaatcattggttctttccatagtacatagttgttgcggtgcagaagcaataaatacagagtgtggaacgccgcttacgttaatactaagaggatgatctgtattataatacgacggataaaagtttttccaattatatggtagattgttaactccaagataccagtatacctcaaaaatttgagtgagatccgctgccaagttcctattattgaagatcgcaatacccaattccttgacctgagttagtgatctccaatccatgttagcgcttcctaaataaatatgtgtattatcagatatccaaaattttgtatgaagaactcctcctaggatatttgtaatatctatgtatcgtacttcaactccggccatttgtagtctttcaacatcctttaatggtttgttagatttattaacggctactctaactcgtactcctcttttgggtaattgtacaatctcgtttaatattatcgtgccgaaattcgtacccacttcatccgataaactccaataaaaagatgatatatctagtgtttttgtggtattggatagaatttccctccacatgttaaatgtagacaaatatactttatcaaattgcatacctataggaatagtttctgtaatcactgcgattgtattatccggattcattttatttgttaaaagaataatcctatatcacttcactctattaaaaatccaagtttctatttctttcatgactgattttttaacttcatccgtttccttatgaagatgatgtttggcaccttcataaatttttatttctctattacaatttgcatgttgcatgaaataatatgcacctaaaacatcgctaatcttattgtttgttccctggagtatgagagtcggggggtgttaatcttggaaattatttttctaaccttgttggtagccttcaagacctgactagcaaatccagccttaattttttcatgattgactaatgggtcgtattggtatttataaactttatccatatctctagatactgattctggacatagctttccgactggcgcatttggtgtgatggttcccataagtttggcagctagcagattcagtcttgaaacagcatctgcattaactagaggagacattagaatcattgctgtaaacaagtttggattatcgtaagaggctagctcccatggaatgacccaataagtagatttaatagttaccacgtgctgtaccaaagtcatcaatcatcattttttcaccattacttcttccatgtccaatatgatcatgtgagaatactaaaattcctaacgatgatatgttttcagctagttcgtcataacgtccagaatgtttaccagctccatgacttatgaatactaatgccttaggatatgtaataggtttccaatatttacaatatatgtaatcattgtccagattgaacatacagtttgcactcatgattcacgttatataactatcaatattaacagttcgtttgatgatcatattatttttatgttttattgataattgtaaaaacatacaattaaatcaatatagaggaaggagacggctactgtcttttgtaagatagtcatggcgactaaattagattatgaggatgctgttttttactttgtggatgatgataaaatatgtagtcgcgactccatcatcgatctaatagatgaatatattacgtggagaaatcatgttatagtgtttaacaaagatattaccagttgtggaagactgtacaaggaattgatgaagttcgatgatgtcgctatacggtactatggtattgataaaattaatgagattgtcgaagctatgagcgaaggagaccactacatcaattttacaaaagtccatgatcaggaaagtttattcgctaccataggaatatgtgctaaaatcactgaacattggggatacaaaaagatttcagaatctagattccaatcattgggaaacattacagatttgatgaccgacgataatataaacatcttgatactttttctagaaaaaaaattgaattgatgatataggggtcttcataacgcataattattacgttagcattctatatccgtgttaaaaaaaattatcctatcatgtatttgagagttttatatgtagcaaacatgatagctgtgatgccaataagctttagatattcacgcgtgctagtgttagggatggtattatctggtggtgaaatgtccgttatataatctacaaaacaatcatcgcatatagtatgcgatagtagagtaaacatttttatagtttttactggattcatacatcgtctacccaattcggttataaatgaaattgtcgccaatcttacacccaaccccttgttatccattagcatagtattaacttcgttatttatgtcataaactgtaaatgattttgtagatgccatatcatacatgatattcatgtccctattataatcattactaactttatcacaatatatgttgataatatctatatatgatctagtctttgtgggcaactgtctatacaagtcgtctaaacgttgtttactcatatagtatcgaacagccatcattacatggtcccgttccgttgatagataatcgagtatgttagtggacttgtcaaatctatataccatattttctggaagtggatatacatagtcgtgatcaacattattgctagcctcatcttctatatcctgtactataccattatctatatcatctacataatctatgatattattacacataaacatcgacaacatactattgtttattatctaagtcctgttgatccaaacccttgatctcctctatttgtactatctagagattgtacttcttccagttctggataatatatacgttgatagattagctgagctattctatctccagtatttacattaaacgtacattttccattattaataagaatgactcctatgtttcccctataatcttcgtctattacaccacctcctatatcaatgccttttagtgacagaccagacctaggagctattctaccatagcagaacttaggcatggacatactaatatctgtcttaattaactgtctttctcctggagggatagtataatcgtaagcgctatacaaatcatatccggcagcacccggcgattgcctagtaggagatttagctctgttagtttccttaacaaatctaactggtgagttaatattcatgttgaacataaaactaatattttatttcaaaattatttaccatcccatatattccatgaataagtgtgatgattgtacacttctatagtatctatatacgatccacgataaaatcctcctatcaatagcagtttattatccactatgatcaattctggattatccctcggataaataggatcatctatcagagtccatgtattgctggattcacaataaaattccgcatttctaccaaccaagaataaccttctaccgaacactaacgcgcatgatttataatgaggataataagtggatggtccaaactgccactgatcatgattgggtagcaaatattctgtagttgtatcagtttcagaatgtcctcccattacgtatataacattgtttatggatgccactgctggattacatctaggtttcagaagactcggcatattaacccaagcagcatccccgtggaaccaacgctcaacagatgtgggatttggtagacctcctactacgtataatttattgttagcgggtatcccgctagcatacagtctggggctattcatcggaggaattggaatccaattgtttgatatataatttacagctatagcattgttatgtatttcattgttcatccatccaccgatgagatatactacttctccaacatgagtacttgtacacatatggaatatatctataatttgatccatgttcataggatactctatgaatggatacttgtatgatttgcgtggttgtttatcacaatgaaatattttggtacagtctagtatccattttacattatttatacctctgggagaaagataatttgacctgattacatttttgataaggagtagcagatttcctaatttatttcttcgcctcatataccacttaatgacaaaatcaactacataatcctcatctggaacatttagttcatcgctttctagaataagtttcatagatagataatcaaaattgtctatgatgtcatcttccagttccaaaaagtgtttggcaataaagtttttagtatgacataagagattggatagtccgtattctatacccatcatgtaacactcgacacaatattcctttctaaaatctcgtaagataaagtttatacaagtgtagatgataaattctacagaggttaatatagaagcacgtaataaattgacgacgttatgactatctatatatacctttccagtatatgagtaaataactatagaagttaaactgtgaatgtcaaggtctagacaaacccttgtaactggatctttatttttcgtgtatttttgacgtaaatgtgtgcgaaagtaaggagataactttttcaatatcgtagaattgactattatattgcctcctatggcatcaataattgttttgaatttcttagtcatagacaatgctaatatattcttacagtacacagtattgacaaatatcggcatttatgtttctttaaaagtcaacatctagagaaaaatgattatctttttgagacataactcccattttttggtattcacccacacgtttttcgaaaaaattagtttttccttccaatgatatattttccatgaaatcaaacggattggtaacattataaatttttttaaatcccaattcagaaatcaatctatccgcgacgaattctatatatgttttcatcatttcacaattcattcctataagtttaactggaagagccgcagtaagaaattcttgttcaatggatactgcatctgttataatagatctaacggtttcttcactcggtggatgcaataaatgtttaaacatcaaacatgcgaaatcgcagtgcagaccctcgtctctactaattagttcgttggaaaacgtgagtccgggcattaggccacgctttttaagccaaaatatggaagcgaatgatccagaaaagaaaattccttctactgcagcaaaggcaataagtctctctccataaccggcgctgtcatgtatccacttttgagcccaatcggccttcttttttacacaaggcatcgtttctatggcattaaagagatagtttttttcattactatctttaacataagtatcgatcaaaagactatacatttccgaatgaatgttttcaatggccatctgaaatccgtagaaacatctagcctcggtaatctgtacttctgtacaaaatcgttccgccaaattttcattcactattccgtcactggctgcaaaaaacgccaatacatgttttataaaatatttttcgtctggtgttagtttattccaatcattgatatctttagatatatctacttcttccactgtccaaaatgatgcctctgcctttttatacatgttccagatgtcatgatattggattgggaaaataacaaatctatttggatttggtgcaaggatgggttccataactaaattaacaataacaataaattttttttcagttatctatatgcctgtacttggattttttgtacatcgatatcgccgcaatcactacaataattacaagtattattgatagcattgttattagtactatcataattaaattatctacattcatgggtgctgaataatcgttattatcatcattatcattttgtaattgtgacatcatactagataaatcgtttgcgagattgttgtgggaagcgggcatggaggatgcattatcattattatttaacgccttccatttggattcacaaatgttacgcacattcaacattttatggaaactataattttgtgaaaacaaataacaagaaaactcgtcatcgttcaaatttttaacgatagtaaaccgattaaacgtcgagctaatttctaacgctagcgactctgttggatatgggtttccagatatatatcttttcagttcccctacgtatctataatcatctgtaggaaatggaagatatttccatttatctactgttcctaatatcatatgtggtggtgtagtagaaccattaagcgcgaaagatgttatttcgcatcgtattttaacttcgcaataatttctggttagataacgcactctaccagtcaagtcaatgatattagcctttacagatatattcatagtagtcgtaacgatgactccatcttttagatgcgatactcctttgtatgtaccagaatcttcgtacctcaaactcgatatatttaaacaagttaatgagatattaacgcgttttatgaatgatgatatataaccagaagttttatcctcggtggctagcgctataaccttatcattataataccaactagtgtgattaatatgtgacacgtcagtgtgggtacaaatatgtacattatcgtctacgtcgtattcgatacatccgcatacagccaacaaatataaaatgacaaatactctaacgccgttcgtacccatcttgatgcggtttaataaatgttttgatttcaatttattgtaaaaaaagattcggttttatactgttcgatattctcattgcttatattttcatctatcatctccacacagtcaaatccgtggttagcatgcacctcatcaaccggtaaaagactatcggactcttctatcattataactctagaatatttaatttggtcattattaatcaagtcaattatcttatttttaacaaacgtgagtattttactcattttttataaaaacttttagaaatatacagactctatcgtgtgtctatatcttctttttatatccaatgtatttatgtctgatttttcttcatttatcatatataatggtccaaattctacacgtgcttcggattcatccagatcattaaggttcttataattgtaacatccttctcttccctcttctacatcttccttcttattcttattcttagcgtcacagaatctaccacagcaggatcccatgacgagcgtcatattaaactaatccattttcaattataatatatgattagtaatgaccattaaaataaaaaatattcttcataaccggcaagaaagtgaaaagttcacattgaaactatgtcagtagtatacatcatgaaatgatgatatatatatactctattttggtggaggattatatgatataattcgtggataatcatttttaagacacatttctttattcgtaaatcttttcacgttaaatgagtgtccatattttgcaatttcttcatatgatggcggtgtacgtggacgaggctgctcctgttcttgttgtggtcgccgactgtcgtgtctgcgtttagatccctccattatcgcgattgcgtagatggagtactattttataccttgtaattaaatttttttattaattaaacgtataaaaacgttccgtatctgtatttaagagccagatttcgtctaatagaacaaatagctacagtaaaaataactagaataattgctacacccactagaaaccacggatcgtaatacggcaatcggttttcgataataggtggaacgtatattttatttaaggacttaacaattgtctgtaaaccacaatttgcttccgcggatcctgtattaactatctgtaaaagcatatgttgaccgggcggagccgaacattctccgatatctaatttctgtatatctataatattattaacctccgcatacgcattacagttcttttctagcttggataccgcactaggtacatcgtctagatctattcctatttcctcagcgatagctcttctatccttttccggaagcaatgaaatcacttcaataaatgattcaaccatgagtgtgaaactaagtcgagaattactcatgcatttgttagttattcggagcgcgcaatttttaaactgtcctataacctctcctatatgaatagcacaagtgacattagtagggatagaatgttgagctaatttttgtaaataactatctataaaaagattatacaaagttttaaactctttagtttccgccatttatccagtctgagaaaatgtctctcataataaatttttccaagaaactaattgggtgaagaatggaaacctttaatctatatttatcacagtctgttttggtacacatgatgaattcttccaatgccgtactaaattcgatatctttttcgatttctggatatgtttttaataaagtatgaacaaagaaatggaaatcgtaataccagttatgtttaactttgaaattgttttttattttcttgttaatgattccagccacttgggaaaagtcaaagtcgtttaatgccgatttaatacgttcattaaaaacaaactttttatcctttagatgaattattattggttcattggaatcaaaaagtaagatattatcgggtttaagatctgcgtgtaaaaagttgtcgcaacagggtagttcgtagattttaatgtataacagagccatctgtaaaaagataaactttatgtattgtaccaaagatttaaatcctaatttgatagctaactcggtatctactttatctgccgaatacagtgctaggggaaaaattataatgtttcctctttcatattcgtagttagttctcttttcatgttcgaaaaagtgaaacatgcggttaaaatagtttataacattaatattactgttaataactgccggataaaagtgggatagtaatttcacgaatttgatactgtcctttctctcgttaaacgcctttaaaaaaactttagaagaatatctcaatgagagttcctgaccatccatagtttgtatcaataatagcaacatatgaagaacacgtttatacagagtatgtaaaaatgttaatttatagtttaatcccatggcccacgcacacacgattaattttttttcatctccctttagattgttgtatagaaatttgggtactgtgaactccgccgtagtttccatgggactatataattttgtggcctcgaatacaaattttactacatagttatctatcttaaagactataccatatcctcctgtagatatgtgataaaaatcgtcgtttataggataaaatcgtttatccttttgttggaaaaaggatgaattaatgtaatcattctcttctatctttagtagtgtttccttattaaaattcttaaaataatttaacaatctaactgacggagcccaattttggtgtaaatctaattgggacattatattgttaaaatacaaacagtctcctaatataacagtatctgataatctatggggagacatccattgatattcaggggatgaatcattggcaacacccatttattgtacaaaaagccccaatttacaaacgaaagtccaggtttgatagagacaaacaattaactattttgtctctgtttttaacacctccacagtttttaatttctttagtaatgaaattattcacaatatcagtatcttctttatctaccagagattttactaacttgataaccttggctgtctcattcaatagggtagtaatatttgtatgtgtgatattgatatctttttgaattgtttcttttagaagtgattctttgatggtgccagcatacgaattacaataatgcagaaactcggttaacatgcaggaattatagtaagccaattccaattgttgcctgtgttgtattagagtgtcaatatgagcaatggtgtccttgcgtttctctgatagaatgcgagcagcgattttggcgttatcatttgacgatatttctggaatgacgaatcctgtttctactaactttttggtaggacaaagtgaaacaatcaagaagatagcttctcctcctatttgtggaagaaattgaactcctctagatgatctactgacgatagtatctccttgacagatattggaccgaattacagaagtacctggaatgtaaagccctgaaaccccctcattttttaagcagattgttgccgtaaatcctgcactatgcccaagatagagagctcctttggtgaatccatctctatgtttcagtttaaccaagaaacagtcagctggtctaaaatttccatctctatctaatacagcatctaacttgatgtcaggaactatgaccggtttaatgttatatgtaacattgagtaaatccttaagttcataatcatcactgtcatcagttatgtacgatccaaacaatgtttctaccggcatagtggatacgaagatgctatccatcagaatgtttccctgattagtattttctatatagctattcttctttaaacgattttccaaatcagtaactatgttcatttttttaggagtaggacgcctagccagtatggaagaggattttctagatcctctcttcaacatctttgatctcgatggaatgcaaaaccccatagtgaaacaaccaacgataaaaataatattgtttttcactttttataattttaccatctgactcatggattcattaatatctttataagagctactaacgtataattctttataactgaactgagatatatacaccggatctatggtttccataattgagtaaatgaatgctcggcaataactaatggcaaatgtatagaacaacgaaattatactagagttgttaaagttaatattttctatgagctgttccaataaattatttgttgtgactgcgttcaagtcataaatcatcttgatactatccagtaaaccgtttttaagttctggaatattatcatcccattgtaaagcccctaattcgactatcgaatatcctgctctgatagcagtttcaatatcgacggacgtcaatactgtaataaaggtggtagtattgtcatcatcgtgataaactacgggaatatggtcgttagtaggtacggtaactttacacaacgcgatatataactttccttttgtaccatttttaacgtagttgggacgtcctgcagggtattgttttgaagaaatgatatcgagaacagatttgatacgatatttgttggattcctgattattcactataatataatctagacagatagatgattcgataaatagagaaggtatatcgttggtaggataatacatccccattccagtattctcggatactctattgatgacactagttaagaacatgtcttctattctagaaaacgaaaacatcctacatggactcattaaaacttctaacgctcctgattgtgtctcgaatgcctcgtacaaggatttcaaggatgccatagattctttgaccaacgatttagaattgcgtttagcatctgatttttttattaaatcgaatggtcggctctctggtttgctaccccaatgataacaatagtcttgtaaagataaaccgcaagaaaatttatacgcatccatccaaataaccctagcaccatcggatgatattaatgtattattatagattttccatccacaattattgggccagtatactgttagcaacggtatatcgaatagattactcatgtaacctactagaatgatagttcgtgtactagtcataatatctttaatccaatctaaaaaatttaaaattagattttttacactgttaaagttaacaaaagtattacccgggtacgtggatatcatatatggcattggtccattatcagtaatagctccataaactgatacggcgatggtttttatatgtgtttgatctaacgaggaagaaattcgcgcccacaattcatctctagatatgtatttaatatcaaacggtaacacatcaatttcgggacgcgtatatgtttctaaatttttaatccaaatataatgatgacctatatgccctattatcatactgtcaactatagtacacctagggaacttacgatacatctgtttcctataatcgttaaattttacaaatctataacatgctaaaccttttgacgacagccattcattaatttctgatatggaatctgtattctcgataccgtatcgttctaaagccagtgctatatctccctgttcgtgggaacgctttcgtataatatcgatcaacggataatctgaagtttttggagaataatatgactcatgatctatttcgtccataaacaatctagacataggaattggaggcgatgatcttaattttgtgcaatgagtcgtcaatcctataacttctaatcttgtaatattcatcatcgacataatactatctatgttatcatcgtatattagtataccatgaccttcttcatttcgtgccaaaatgatatacagtcttaaatagttacgcaatatctcaatagtttcataattgttagctgttttcatcaaggtttgtatcctgtttaacatgatggcgttctataacgtctctattttctatttttaattttttaaatttttaacgatttactgtggctagatacccaatctctctcaaatatttttttagcctcgcttacaagctgtttatctatactattaaaactgacgaatccgtgattttggtaatgggttccgtcgaaatttgccgaagtgatatgaacatattcgtcgtcgactatcaacaattttgtattattctgaatagtgaaaaccttcacagatagatcattttgaacacacaacgcatctagacttttggcggttgccatagaatatacgtcgttcttatcccaattaccaactagaagtctgatcttaactcctctattaatggctgcttctataatggagttgtaaatgtcgggccaatagtagctattaccgtcgacacgtgtagtgggaactatggccaaatgttcaatatctatactagtcttagctgacctgagtttatcaataactacatcggtatctagatctctagaatatcccaataggtgttccggagaatcagtaaagaacactccacctataggattcttaatatgatacgcagtgctaactggcaaacaacaagccgcagagcataaattcaaccatgaattttttgcgctattaaaggctttaaaagtatcaaatcttctacgaagatctgtggccagcgggggataatcagaatatacacctaacgttttaatcgtatgtatagatcctccagtaaatgacgcgtttcctacataacatctttcatcatctgacacccaaaaacaaccgagtagtagtcccacattattttttttatctatattaacggttataaaatttatatccgggcagtgactttgtagctctcccagatttcttttccctcgttcatctagcaaaactattattttaatccctttttcagatgcctcttttagtttatcaaaaataagcgctcccctagtcgtactcagaggattacaacaaaaagatgctatgtatatatatttcttagctagagtgataatttcgttaaaacattcaaatgttgttaaatgatcggatctaaaatccatattttctggtagtgtttctaccagcctacattttgctcccgcaggtaccgatgcaaatggccacatttagttaacataaaaacttatacatcctgttctatcaacgattctagaatatcatcggctatatcgctaaaattttcatcaaagtcgacatcacaacctaactcagtcaatatattaagaagttccatgatgtcatcttcgtctatttctatatccgtatccattgtagattgttgaccgattatcgagtttaaatcattactaatactcaatccttcagaatacaatctgtgtttcattgtaaatttataggcggtgtatttaagttggtagattttcaattatgtattaatatagcaacagtagttcttgctcctccttgattctagcatcctcttcattattttcttctacgtacataaacatgtccaatacgttagacaacacaccgacgatggcggccgcaggatcctgcgaagcttacagacacgaatatgactaaaccgatgaccatttaaaaacccctctctagctttcacttaaactgtatcgatcattcttttagcacatgtataatataaaaacattattctatttcgaatttaggcttccaaaaatttttcatccgtaaaccgataataatatatatagacttgttaatagtcggaataaatagattaatgcttaaactatcatcatctccacgattagagatacaatatttacattctttttgctgtttcgaaactttatcaatacacgttaatacaaacccaggaaggagatattgaaactgaggctgttgaaaatgaaacggtgaatacaataattcagataatgtaaaatcatgattccgtattctgatgatattagaactgctaatggatgtcgatggtatgtatctaggagtatctattttaacaaagcatcgatttgctaatatacaattatccttttgattaattgttattttattcatattcttaaaaggtttcatatttatcaattcttctacattaaaaatttccatttttaatttatgtagccccgcaatactcctcattacgtttcattttttgtctataatatccattttgttcatctcggtacatagattatccaattgagaagcgcatttagtagttttgtacattttaagtttattgacgaatcgtcgaaaactagttatagttaacattttattatttgataccctgatattaatacccctgccgttactattatttataactgatgtaatccacgtaacattggaattaactatcgatagtaatgcatcgacgcttccaaaattgtctattataaactcaccgataatttttttattgcatgttttcatattcattaggattatcaaatctttaatcttattacgattgtatgcgttgatattacaagacgtcattctaaaagacggaggatctccatcaaatgccagacaatcacgtacaaagtacatggaaataggttttgttctattgcgcatcatagatttatatagaacacccgtagaaatactaatttgttttactctataaaatactaatgcatctatttcatcgttttgtataacgtctttccaagtgtcaaattccaaatttttttcattgatagtaccaaattcttctatctctttaactacttgcatagataggtaattacagtgatgcctacatgccgttttttgaaactgaatagatgcgtctagaagcgatgctacgctagtcacaatcaccactttcatatttagaatatatatatgtaaaaatatagtagaatttcattttgtttttttctatgctataaatgaattctcattttgcatctgctcatactccgttttatattaataccaaagaaggaagatatctggttctaaaagccgttaaagtatgcgatgttagaactgtagaatgcgaaggaagtaaagcttcctgcgtactcaaagtagataaaccctcatcgcccgcgtgtgagagaagaccttcgtccccgtccagatgcgagagaatgaataaccctggaaaacaagttccgtttatgaggacggacatgctacaaaatatgttcgcggctaatcgcgataatgtagcttctagacttttgtcctaaaatactattatatccttttcgatattaataaatccgtgtcgtccaggttttttatctctttcagtatgtgaatagataggtattttatctctattcatcatcgaatttaagagatccgataaacattgtttgtattctccagatgtcagcatctgatacaacaatatatgtgcacataaacctctggcacttatttcatgtaccttccccttatcactaaggagaatagtatttgagaaatatgtatacatgatattatcatgaattagatatacagaatttgtaacactctcgaaatcacacgatgtgtcggcgttaagatctaatatatcactcgataacacattttcatctagatacactagacattttttaaagctaaaatagtctttagtagtaacagtaactatgcgattattttcatcgatgatacatttcatcggcatattattacgcttaccatcaaagactataccatgtgtatatctaacgtattctagcatggttgccatacgcgcattaaacttttcaggatctttggatagatcttccaatctatctatttgagaaaacatttttatcatgttcaatagttgaaacgtcggatccactatatagatattatctataaagattttaggaactacgttcatggtatcctggcgaatattaaaactatcaatgatatgattatcgttttcatcttttatcaccatatagtttctaagatatgggattttacttaatataatattatttcccgtgataaattttattagaaaggccaaatctataagaaaagtcctagaattagtctgaagaatatctatatcgccgtatagtatatttggattaattagatatagagaatatgatccgtaacatatacaacttttattatggcgtctaagatattcttccatcaacttattaacatttttgactagggaagatacattatgacgtcccattacttttgccttgtctattactgcgacgttcatagaatttagcatatctcttgccaattcttccattgatgttacattataagaaattttagatgaaattacatttggagctttaatagtaagaactcctaatatgtccgtgtatgtggtcactaatacagattgtagttctataatcgtaaataatttacctatattatatgtttgagtctgtttagaaaagtagctaagtatacgatcttttatttctgatgcagatgtattaacatcggaaaaaaatctttttttattcttttttactaaagatacaaatatgtctttgttaaaaacagttattttctgaatatttctagcttgtaattttaacatatgatattcgttcacactaggtactctgcctaaataggtttctataatctttaatgtaatattaggaaaagtattctgatcaggattcctattcattttgaggatttaaaactctgattattgtctaatatggtctctacgcaaactttttcacagagcgatagagtttttgataactcgtttttcttaagaaatataaaactactgtctccagagctcgctctatcttttattttatctaattcgatacaaactcctgatactggttcagaaagtaattcattaattttcagtcctttatagaagatatttaatatagataatacaaaatcttcagtttttgatatcgatctgattgatcctagaactagatatattaataacgtgctcattaggcagtttatggcagcttgataattagatatagtatattccagttcatatttattagataccgcattgcccagattttgatattctatgaattcctctgaaaataaatccaaaataactagacattctattttttgtggattagtgtactctcttccctctatcatgttcactactggtgtccacgatgataaatatctagagggaatataatatagtccataggatgccaatctagcaatgtcgaataactgtaattttattcttcgctcttcattatgaattgattcttgaggtataaacctaacacaaattatattattagacttttcgtatgtaatgtctttcatgttataagtttttaatcctggaatagaatctattttaatgaggcttttaaacgcagagttctccaacgagtcaaagcataatactctgttgtttttcttatatacgatgttacgattttcttctttgaatggaataggtttttgaattagtttataattacaacataatagataaggaagtgtgcaaatagtacgcggaaaaaacataatagctcccctgttttcatccatggttttaagtaaatgatcactggcttctttagtcaatggatattcgaacattaaccgtttcatcatcattggacagaatccatatttcttaatgtaaagagtgatcaaatcattgtgtttattgtaccatcttgttgtaaatgtgtattcggttatcggatctgctcctttttctattaaagtatcgatgtcaatctcgtctaagaattcaactatatcgacatatttcatttgtatacacataaccattactaacgtagaatgtataggaagagatgtaacgggaacagggtttgttgattcgcaaactattctaatacataattcttctgttaatacgtcttgcacgtaatctattatagatgccaagatatctatataattattttgtaagatgatgttaactatgtgatctatataagtagtgtaataattcatgtattttgatatatgttccaactctgtctttgtgatgtctagtttcgtaatatctatagcatcctcaaaaaatatattcgcatatattcccaagtcttcagttctatcttctaaaaaatcttcaacgtatggaatataataatctattttacctcttctgatatcattaatgatatagtttttgacactatcttctgtcaattgattcttattcactatatctaagaaacggatagcgtccctaggacgaactactgccattaatatctctattatagcttctggacataattcatctattataccagaattaatgggaactattccgtatctatctaacatagttttaagaaagtcagaatctaagacttgatgttcatatattggttcatacatgaaatgatctctattgatgatagtgactatttcattctctgaaaattggtaactcattctatatatgctttccttgttgatgaaggatagaatatactcaatagaatttgtaccaacaaactgttctcttatgaatcgtatatcatcatctgaaataatcatgtaaggcatacatttaacaattagagacttgtctcctgttatcaatatactattcttgtgataatttatgtgtgaggcaaatttgtccacgttctttaattttgttatagtagatatcaaatccaatggagctacagttcttggcttaaacagatatagtttttctggaacaaattctacaacattattataaaggactttgggtagataagtgggatgaaatcctattttaattaatgcgatagccttgtcctcgtgcagatatccaaacgcttttgtgatagtatggcattcattgtctagaaacgctctacgaatatctgtgacagatatcatctttagagaatatactagtcgcgttaatagtactacaatttgtattttttaatctatctcaataaaaaaattaatatgtatgattcaatgtataactaaactactaactgttattgataactagaatcagaatctaatgatgacgtaaccaagaagtttatctactgccaatttagctgcattatttttagcatctcgtttagattttccatcggccttatcgaatactcttccgtcgatgtctacacaggcataaaatgtaggagagttactaggcccaactgattcaatacgaaaagaccaatctctcctagtaatttggcagtactcattaataacggtgacagggttagcatctttccaatcaataatttttttagccggaataacatcatcaaaagacttatgatcctctctcattgatttttcgcgggatacatcatctattatgacgtcagccatagcatcagcatccggcttatccgcctccgttgtcataaaccaacgaggaggaatatcgtcggagctgtacaccatagcactacgttgaagatcgtacagagctttattaacttctcgcttctccatattaagttgtctagttagttgtgcagcagtagctccttcgattccaatgtttttaatagccgcacacacaatctctgcgtcagaacgctcgtcaatatagatcttagacatttttagagagaactaacgcaaccagcaataaaactgaacctactttatcatttttttattcatcatcctctggtggttcgtcgttcctatcaaatgtagctctgattaacccgtcatctataggtgatgctggttctggagattctggaggagatggattattatctggaagaatctctgttatttccttgttttcatgtatcgattgcgttgtaacattaagattgcgaaatgctctaaatttgggaggcttaaagtgttgtttgcaatctctacacgcgtgtctaactagtggaggttcgtcagctgctctagtttgaatcatcatcggcgtagtattcctacttttacagttaggacacggtgtattgtatttctcgtcgagaacgttaaaataatcgttgtaactcacatcctttattttatctatattgtattctactcctttcttaatgcattttataccgaataagagatagcgaaggaattctttttcggtgccgctagtacccttaatcatatcacatagtgttttatattccaaatttgtggcaatagacggtttatttctatacgatagtttgtttctggaatcctttgagtattctataccaatattattctttgattcgaatttagtttcttcgatattagattttgtattacctatattcttgatgtagtactttgatgatttttccatggcccattctattaagtcttccaagttggcatcatccacatattgtgatagtaattctcggatatcagtagcggctaccgccattgatgtttgttcattggatgagtaactactaatgtatacattttccatttataacacttatgtattaactttgttcatttatattttttcattattatgttgatattaacaaaagtgaatatatatatgttaataattgtattgtggttatacggctacaattttataatgagtgaaagtcagtgtccgatgatcaatgacgatagctttactctgaaaagaaagtatcaaatcgatagtgcggagtcaacaataaaaatggataagaagaggataaagtttcagaatagagccaaaatggtaaaagaaataaatcagacaataagagcagcacaaactcattacgagacattgaaactaggatacataaaatttaagagaatgattatgactactactctagaagatatagcaccatctattccaaataatcagaaaacttataaactattctcggacatttcagccatcggcaaagcatcacagaatccgagtaagatggtatatgctctgctgctttacatgtttcccaatttgtttggagatgatcatagattcattcgttatagaatgcatccaatgagtaaaatcaaacacaagatcttctctcctttcaaacttaatcttattagaatattagtggaagaaagattctataataatgaatgcagatctaataaatggagaataattggaacacaagttgataaaatgttgatagctgaatctgataaatatacaatagatgcaaggtataacctaaaacccatgtatagaatcaagggagaatctgaagaagataccctctttatcaaacagatggtagaacaatgtgtgacatcccaggaattggtggaaaaagtgttgaagatactgtttagagatttgttcaagagtggagaatacaaagcgtacagatacgatgatgatgtagaaaatggatttattggattggatacactaaaattaaacattgttcatgatatagttgaaccatgtatgcctgttcgtaggccagtggctaagatactgtgtaaagaaatggtaaataaatactttgagaatccgctacatattattggtaaaaatcttcaagagtgcattgactttgttagtgaataggcatttcatctttctccaatactaattcaaattgttaaattaataatggatagtataaatagttattagttataagatagtaaaaataattattagaataagagtgtagtatcatagataactctcttctataaaaatggattttattcgtagaaagtatcttatatacacagtagaaaataatatagattttttaaaggatgatacattaagtaaagtaaacaattttaccctcaatcatgtactagctctcaagtatctagttagcaattttcctcaacacgttattactaaggatgtattagctaataccaatttttttgttttcatacatatggtacgatgttgtaaagtgtacgaagcggttttacgacacgcatttgatgcacccacgttgtacgttaaagcattgactaagaattatttatcgtttagtaacgcaatacaatcgtacaaggaaaccgtgcataaactaacacaagatgaaaaatttttagaggttgccgaatacatggacgaattaggagaacttataggcgtaaattatgacttagttcttaatccattatttcacggaggggaacccatcaaagatatggaaatcatttttttaaaactgtttaagaaaacagacttcaaagttgttaaaaaattaagtgttataagattacttatttgggcatacctaagcaagaaagatacaggcatagagtttgcggataatgatagacaaaatatatacactctatttcaacaaactggtagaatcgtccatagcaatctaacagaaacgtttagagattatatctttcccggagataagactagctattgggtgtggttaaacgaaagtatagctaatgatgcggatatcgttcttaatagacacgccattaccatgtatgataaaattcttagttatatatactctgagataaaacaaggacgcgttaataaaaacatgcttaagttagtttatatctttgagcctgaaaaagatatcagagaacttctgctagaaatcatatatgatattcctggagatatcctatctattattgatgcaaaaaacgacgattggaaaaaatattttattagtttttataaagctaattttattaacggtaatacatttattagtgatagaacgtttaacgaggacttattcagagttgttgttcaaatagatcccgaatatttcgataatgaacgaattatgtctttattctctacgagtgctgcggacattaaacgatttgatgagttagatattaataacagttatatatctaatataatttatgaggtgaacgatatcacattagatacaatggatgatatgaagaagtgtcaaatctttaacgaggatacgtcgtattatgttaaggaatacaatacatacctgtttttgcacgagtcggatcccatggtcatagagaacggaatactaaagaaactgtcatctataaaatccaagagtagacggctgaacttgtttagcaaaaacattttaaaatattatttagacggacaattggctcgtctaggtcttgtgttagatgattataaaggagacttgttagttaaaatgataaaccatcttaagtctgtggaggatgtatccgcattcgttcgattttctacagataaaaaccctagtattcttccatcgctaatcaaaactattttagctagttataatatttccatcatcgtcttatttcaaaggtttttgagagataatctatatcatgtagaagaattcttggataaaagcatccatctaaccaagacggataagaaatatatacttcaattgataagacacggtagatcatagaacagaccaaatatattattaataatttgtatatacatagatataattatcacacatttttgataaatgggaactgctgcaacaattcagactcccaccaaattaatgaataaagaaaatgcagaaatgattttggaaaaaattgttgatcatatagttatgtatattagtgacgaatcaagtgattcagaaaataatcctgaatatattgattttcgtaacagatacgaagactatagatctctcattataaaaagtgatcacgagtttgtaaagctatgtaaaaatcatgcggagaaaagttctccagaaacgcaacaaatgattatcaaacacatatacgaacaatatcttattccagtatctgaagtactattaaaacctataatgtccatgggtgacataattacatataacggatgtaaagacaatgaatggatgctagaacaactctctaccctaaactttaacaatctccgcacatggaactcatgtagcataggcaatgtaacgcgtctgttttatacattttttagttatctgatgaaagataaactaaatatataagtataatcccattctaatactttaacctgatgtattagcatcttattagaatattaacctaactaaaagacataacataaaaactcattacatagttgataaaaagcggtaggatataaatattatggctgccaccgttccgcgttttgacgacgtgtacaaaaatgcacaaagaagaattctagatcaagaaacattttttagtagaggtctaagtagaccgttaatgaaaaacacatatctatttgataattacgcgtatggatggataccagaaactgcaatttggagtagtagatacgcaaacctagatgctagtgactattatcccatttcgttgggattacttaaaaagttcgagtttctcatgtctctatataaaggtcctattcccgtatatgaagaaaaagtaaatactgaattcatagccaatggatcgttctctggtagatacgtatcatatcttcgaaagttttctgcccttccaacaaacgagtttattagttttttgttactgacttccattccaatctataatatcttgttctggtttaaaaacacacagtttgatattactaaacacacattattcagatacgtctatacagataatgccaaacacctggcgttggctaggtatatgcatcaaacaggagactataagcctttgtttagtcgtctcaaagagaattatatatttaccggtcccgttccaataagtatcaaagatatagatcaccctaatcttagtagagcaagaagtccatccgattatgagacattagctaatattagtactatattgtactttaccaagtatgatccggtattaatgtttttattgttttacgtacctgggtattcaattactacaaaaattactccagccgtagaatatctaatggataaactgaatctaacaaagagcgacgtacaactgttgtaaattattttatgcttcgtaaaatgtaggttttgaaccaaacattctttcaaagaatgagatgcataaaactttattatccaatagattgactatttcggacgtcaatcgtttaaagtaaacttcgtaaaatattctttgatcactgccgagtttaaaacttctatcgataattgtctcatatgttttaatatttacaagttttttggtccatggtacattagccggacaaatatatgcaaaataatatcgttctccaagttctatagtttctggattatttttattatattcagtaactaaatacatattagggttatctgcggatttataatttgagtgatgcattctactcaacataaataattctagaggagacgatctactatcaaattcggatcgtaaatctgtttctaaagaacggagaatatctatacatacctgattagaattcatccgtccttcagacaacatctcagacagtctggttttgtacatcttaatcatattcttatgaaacttggaaacatctcttctagtttcactagtacctttattaattctctcaggtacagattttgaattcgacgatgctgagtatttcatcgttgtatatttcttcttcgattgcataatcagattcttatataccgcctcaaactctattttaaaattattaaacaatactctattattaatcagtcgttctaactctttcgctatttctatagacttatctacatcttgactgtctatctctgtaaacacggagtcggtatctccatacacgctacgaaaacgaaatctgtaatctataggcaacgatgttttcacaatcggattaatatctctatcgtccatataaaatggattacttaatggattggcaaaccgtaacataccgttagataactctgctccatttagtaccgattctagatacaagatcattctacgtcctatggatgtgcaactcttagccgaagcgtatgagtatagagcactatttctaaatcccatcagaccatatactgagttggctactatcttgtacgtatattgcatggaatcatagatggccttttcagttgaactggtagcctgttttagcatctttttatatctggctctctctgccaaaaatgttcttaatagtctaggaatggttccttctatcgatctatcgaaaattgctatttcagagatgaggttcggtagtctaggttcacaatgaaccgtaatatatctaggaggtggatatttctgaagcaatagctgattatttatttcttcttccaatctattggtactaacaacgacaccgactaatgtttccggagatagatttccaaagatacacacattaggatacagactgttataatcaaagattaatacattattactaaacattttttgttttggagcaaataccttaccgccttcataaggaaacttttgttttgtttctgatctaactaagatagttttagtttccaacaatagctttaacagtggacccttgatgactgtactcgctctatattcgaataccatggattgaggaagcacatatgttgacgcacccgcgtctgtttttgtttctactccataatactcccacaaatactgacacaaacaagcatcatgaatacagtatctagccatatctaaagctatgtttagattataatccttatacatctgagctaaatcaacgtcatcctttccgaaagataatttatatgtatcattaggtaaagtaggacataatagtacgactttaaatccattttcccaaatatctttacgaattactttacatataatatcctcatcaacagtcacataattacctgtggttaaaacctttgcaaatgcagcggctttgcctttcgcgtctgtagtatcgtcaccgatgaacgtcatttctctaactcctctatttaatactttacccatgcaactgaacgcgttcttggatatagaatccaatttgtacgaatccaatttttcaaatttttgaatgaatgaatatagatcgaaaaatatagttccattattgttattaacgtgaaacgtagtattggccatgccgcctactcccttatgactagactgatttctctcataaatacagagatgtacagcttcctttttgtccggagatctaaagataattttctctcctgttaataactctagacgattagtaatatatctcagatcaaagttatgtccgttaaaggtaacgacgtagtcgaacgttagttccaacaattgtttagctattcgtaacaaaactatttcagaacatagaactagttctcgttcgtaatccatttccattagtgactgtatcctcaaacatcctctatcgacggcttcttgtatttcctgttccgttaacatctcttcattaatgagcgtaaacaataatcgtttaccacttaaatcgatataacagtaacttgtatgcgagattgggttaataaatacagaaggaaacttcttatcgaagtgacactctatatctagaaataagtacgatcttgggatatcgaatctaggtatttttttagcgaaacagttacgtggatcgtcacaatgataacatccattgttaatctttgtcaaatattgctcgtccaacgagtaacatccgtctggagatatcccgttagaaatataaaaccaactaatattgagaaattcatccatggtggcattttgtatgctgcgtttctttggctcttctatcaaccacatatctgcgacggagcattttctatctttaatatctagattataacttattgtctcgtcaatgtctatagttctcatctttcccaacggcctcgcattaaatggaggaggagacaatgactgatatatttcgtccgtcactacgtaataaaagtaatgaggaaatcgtataaatacggtctcgccatttcgacatctggatttcagatataaaaatctgttttcaccgtgactttcaaaccaattaatgcaccgaacatccatttatagaatttagaaatatattttcatttaaatgaatcccaaacattggggaagagccgtatggaccattatttttatagtactttcgcaagcgggtttagacggcaacatagaagcgtgtaaacgaaaactatatactatagttagcactcttccatgtcctgcatgtagacggcacgcgactatcgctatagaggacaataatgtcatgtctagcgatgatctgaattatatttattattttttcatcagattatttaacaatttggcatctgatcccaaatacgcgatcgatgtgacaaaggttaaccctttataaacttaacccattataaaacttatgattagtcacaactgaaataaccgcgtgattattttttggtataattctacacggcatggtttctgtgactatgaattcaacccccgttacattagtgaaatctttaacaaacagcaagggttcgtcaaagacataaaactcattgtttacaatcgaaatagaccccctatcacacttaaaataaaaaatatccttatcctttaccaccaaataaaattctgattggtcaatgtgaatgtattcacttaacagttccacaaatttatttattaactccgaggcacatacatcgtcggtattttttatggcaaactttactcttccagcatccgtttctaaaaaaatattaacgagttccatttatatcatccaatattattgaaatgacgttgatggacagatgatacaaataagaaggtacggtacctttgtccaccatctcctccaattcatgctctattttgtcattaactttaatgtatgaaaacagtacgccacatgcttccatgacagtgtgtaacactttggatacaaaatgtttgacattagtataattgtccaagactgtcaatctataatagatagtagctataatatattctatgatggtattgaagaagatgacaaccttggcatattgatcatttaacacagacatggtatcaacagatagcttgaatgaaagagaatcagtaattggaataagcgtcttctcgatagagtgtccgtataccaacatgtctgatattttgatgtattccattaaattatttagttttttctttttattctcgttaaacagcatttctgtcaacggaccccaacatcgttgaccgattaagttttgattgatttttccgtgtaaggcgtatctagtcagatcgtatagcctatccaataatccatcgtctgtgtgtagatcacatcgtacactttttaattctctatagaagagcgacagacatctggagcaattacagacagcaatttctttattctctacagatgtaagatacttgaagacattcctatgatgatgcagaattttggataacacggtattgatggtatctgttaccataattcctttgatggctgatagtgtcagagcacaagatttccaatctttgacaatttttagcaccattatctttgttttgatatctatatcagacagcatggtgcgtctgacaacacagggattaagacggaaagatgaaatgattctctcaacatcttcaatagataccttgctattttttctggcattatctatatgtgcgagaatatcctctagagaatcagtatcctttttgatgatagtggatctcaatgacatgggacgtttaaaccttcttattctatcaccagattgcatggtgatttgtcttctttcttttatcataatgtaatctctaaattcatcggcaaattgtctatatctaaaatcataatatgagatgtttacctctacaaatatctgttcgtccaatgttagagtatttacatcagttttgtattccaaattaaacatggcaacggatttaattttatattcctctattaagtcctcgtcgataataacagaatgtagataatcatttaatccgtcgtacatggttggaagatgcttgttgacaaaatctttaattgtcttgatgaaggtgggactatatctaacatcttgattaataaaatttataacattgtccataggatactttgtaactagttttatacacatctcttcatcggtaagtttagacagaatatcgtgaacaggtggtatattatattcatcagatatacgaagaacaatgtccaaatctatattgtttaatatattatatagatgtagcgtagctcctacaggaatatctttaactaagtcaatgatttcatcaaccgttagatctattttaaagttaatcatataggcattgatttttaaaaggtatgtagccttgactacattctcattaattaaccattccaagtcattgtgtgtaagaagattatattctatcataagcttgactacatttggtcccgataccattaaagaattcttatgatataaggaaacagattttaggtactcatctactctacaagaattttggagagccttaacgatatcagtgacgtttattatttcaggaggaaagaatctaacattgagaatatcggaattaatagcttccagatacagtgattttggcaatagtccgtgtaatccataatccagtaacacgagctggtgcttgctagacaccttttcaatgtttaatttttttgaaataagctttgataaagccttcctcgcaaattccggatacatgaacatgtcggcgacatgattaagtattgttttttcattatttttatattttctcaacaagttctcaataccccaatagatgatagaatatcacccaatgcgtccatgttgtctatttccaacaggtcgctatatccaccaatagaagtttttccaaaaaagattctaggaacagttctaccaccagtaatttgttcaaaataatcccgcaattcattttcgggtttaaattctttaatatcgacaatttcatacgctcctcttttgaaactaaacttatttagaatatccagtgcatttctacaaaaaggacatgtatacttgacaaaaattgtcactttgttattggccaacctttgttgtacaaattcctcggccattttaatatttaagtgatataaaactatctcgacttatttaactctttagtcgagatatatggacgcagatagctatatgatagccaactacagaaggcaaacgctataaaaaacataattacgacgagcatatttataaatatttttattcagcattacttgatatagtaatattaggcacagtcaaacattcaaccactctcgatacattaactctctcattttctttaacaaattctgcaatatcttcgtaaaaagattcttgaaactttttagaatatctatcgactctagatgaaatagcgttcgtcaacatactatgttttgtatacataaaggcgcccattttaacagtttctagtgacaaaatgctagcgatcctaggatcctttagaatcacatagattgacgattcgtctctcttagtaactctagtaaaataatcatacaatctagtacgcgaaataatattatccttgacttgaggagatctaaacaatctagttttgagaacatcgataagttcatcgggaatgacatacatactatctttaatagaactcttttcatccagttgaatggattcgtccttaaccaactgattaatgagatcttctattttatcattttccagatgatatgtatgtccattaaagttaaattgtgtagcgcttctttttagtctagcagccaatactttaacatcactaatatcgatatacaaaggagatgatttatctatggcattaagaattcgtttttcgacatccgtcaaaaccaattcctttttgcctgtatcatccagttttccatcctttgtaaagaaattattttctactagactattaataagactgataaggattcctccataattgcacaatccaaactttttaacaaaactagactttacgagatctacaggaatgcgtacttcaggttttttagcttgtgattttttcttttgcggacattttctagtaaccaactcatctaccatttcattgattttagcagtgaaataagctttcaatgcacgggcactgatactattgaaaacgagttgatcttcaaattccgccatttaagttcaccaaacaacttttaaatacaaatatatcaatagtagtagaataagaactataaaaaaaataataattaaccaaccccaacaaccggtattattagttgatgtggtagttttctcatcacttagaacagatttaacaatttctataaagtctgtcaaatcatcttccggagaccccataaatacaccaaatatagcggcgtacaacttatccatttatacattgaatattggcttttctttatcgctatcttcatcatattcatcatcaatatcaacaagtcccagattacgagccagatcttcttctacattttcagtcattgatacacgttcactatctccagagagtccgataacgttagccaccacttctctatcaatgattagtttcttgagcgcgaaagtaatttttgtttccgttccggatctatagaagacgataggtgtgataattgccttggccaattgtctttctcttttactgagtgattctagttcaccttctatagatctgagaatggatgattctccagtcgaaacatattctaccatggatccgtttaatttgttgatgaagatggattcatccttaaatgttttctctgtaatagtttccaccgaaagactatgcaaagaatttggaatgcgttccttgtgcttaatgtttccatagacggcttctagaagttgatacaacataggactagccgcggtaacttttatttttagaaagtatccatcgcttctatcttgtttagatttatttttataaagtttagtctctccttccaacataataaaagtggaagtcatttgactagataaactatcagtaagttttatagagatagacgaacaattagcgtattgagaagcatttagtgtaacgtattcgatacattttgcattagatttactaatcgattttgcatactctataacacccgcacaagtctgtagagaatcgctagatgcagtaggtcttggtgaagtttcaactctcttcttgattaccttactcatgattaaacctaaataattgtactttgtaatataatgatatatattttcactttatctcatttgagaataaaaatgtttttgtttaaccactgcatgatgtacagatttcggaatcgcaaaccaccagtggttttattttatccttgtccaatgtgaattgaatgggagcggatgcgggtttcgtacgtagatagtacattcccgtttttagaccgagactccatccgtaaaaatgcatactcgttagtttggaataactcggatctgctatatggatattcatagattgactttgatcgatgaaggctcccctgtctgcagccatttttatgatcgtcttttgtggaatttcccaaatagttttataaactcgcttaatatcttctggaaggtttgtattctgaatggatccaccatctgccataatcctattcttgatctcatcattccataattttctctcggttaaaactctaaggagatgcggattaactacttgaaattctccagacaatactctccgagtgtaaatattactggtatacggttccaccgactcattatttcccaaaatttgagcagttgatgcagtcggcataggtgccaccaataaactatttctaagaccgtatgttctgattttatcttttagaggttcccaattccaaagatccgacggtacaacattccaaagatcatattgtagaataccgttactggcgtacgatcctacatatgtatcgtatggtccttccttctcagctagttcacaactcgcctctaatgcaccgtaataaatggtttcgaagatcttcttatttagatcttgtgcttccaggctatcaaatggataatttaagagaataaacgcgtccgctaatccttgaacaccaataccgataggtctatgtctcttattagagatttcagcttctggaataggataataattaatatctataattttattgagatttctgacaattactttgaccacatccttcagtttgagaaaatcaaatcgcccatctattacaaacatgttcaaggcaacagatgccagattacaaacggctacctcattagcatccgcatattgtattatctcagtgcaaagattactacacttgatagttcctaaattttgttgattactctttttgttacacgcatccttataaagaatgaatggagtaccagtttcaatctgagattctataatcgctttccagacgactcgagcctttattatagatttgtatctcctttctctttcgtatagtgtatacaatcgttcgaactcgtctccccaaacattgtccaatccaggacattcatccggacacatcaacgaccactctccgtcatccttcactcgtttcataaagagatcaggaatccaaagagctataaatagatctctggttctatgttcctcgtttcctgtattctttttaagatcgaggaacgccataatatcagaatgccacggttccaagtatatggccataactccaggccgtttgtttcctccctgatctatgtatctagcggtgttattataaactctcaacattggaataataccgtttgatataccattggtaccggagatatagcttccactggcacgaatattactaattgatagacctattccccctgccattttagagattaatgcgcatcgttttaacgtgtcatagataccctctatgctatcatcgatcatgttaagtagaaaacagctagacatttggtgacgactagttcccgcattaaataaggtaggagaagcgtgcgtaaaccatttttcagaaagtagattgtacgtctcaatagctgagtctatatcccattgatgaattcctactgcgacacgcattaacatgtgctgaggtctttcaacgatcttgttgtttattttcaacaagtaggatttttccaaagttttaaaaccaaaatagttgtatgaaaagtctcgttcgtaaataataaccgagttgagtttatccttatatttgttaactatatccatggtgatacttgaaataatcggagaatgtttcccatttttaggattaacatagttgaataaatcctccatcacttcactaaatagtttttttgtttccttgtgtagatttgatacggctattctggcggctagaatggcataatccggatgttgtgtagtacaagtggctgctatttcggctgccagagtgtccaattctaccgttgttactccattatatattccttgaataaccttcatagctattttaataggatctatatgatccgtgtttaagccataacataattttctaatacgagacgtgattttatcaaacatgacattttccttgtatccatttcgtttaatgacaaacatttttgttggtgtaataaaaaaattatttaacttttcattaatagggatttgacgtatgtagcgtacaaaatgattgttcctggtatatagataaagagtcctatatatttgaaaatcgttacggctcgattaaactttaatgattgcatagtgaatatatcattaggatttaactccttgactatcatggcggcgccagaaattaccatcaaaagcattaatacagttataccgatcgcagttagaacggttatagcatccaccatttatatctaaaaattagatcaaagaatatgtgacaaagtcctagttgtatactgagaattgacgaaacaatgtttcttacatatttttttcttattagtaaccgacttaatagtaggaactggaaaactagacttgattattctataagtatagatacccttccaaataatattctctttgataaaagttccagaaaatgtagaattttttaaaaagttatcttttgctattaccaagattgtgtttagacgcttattattaatatgagtgatgaaatccacaccgcctctagatatcgcctttatttccacattagatggtaaatccaatagtgaaactatctttttaggaatgtatggactcgcgtttagaggagtaaacgtcttaggcgtcggaaaggatgattcatcaaacgaataaacaatttcacaaatggatgttaatgtattagtaggaaattttttgacgctattggaattgaagattctaatggatgatgttctacctatttcatccgataacatgttaatttccgacaccaacggttttaatatttcgatgatatacggtagtctctctttcggacttatatagcttattccacaatacgagtcattatatactccaaaaaacaaaataactagtataaaatctgtatcgaatgggaaaaacgaaattatcgacataggtatagaatccggaacattgaacgtattaatacttaattctttttctgtggtaagtaccgataggttattgacattgtatggttttaaatattctataacttgagacttgatagatattagtgatgaattgaaaattatttttatcaccacgtgtgtttcaggatcatcgtcgacgcccgtcaaccaaccgaacggagtaaaataaatatcattaatatatgctctagatattagtatttttatcaatcctttgattatcatcttctcgtaggcgaatgattccatgatcaagagtgatttaagaacatcctccggagtattaatgggcttagtaaacagtccatcgttgcaataataaaagttatccaagttaaaggatattatgcattcgtttaaagatatcacctcatctgacggagacaattttttggtaggttttagagactttgaagctacttgtttaacaaagttattcatcgtcgtctactattctatttaattttgtagttaatttatcacatatcacattaattgactttttggtccacttttccatacgtttatattcttttaatcctgcgttatccgtttccgttatatccagggatagatcttgcaagttaaatagaatgctcttaaataatgtcattttcttatccgctaaaaatttaaagaatgtataaacctttttcagagatttgaaactcttaggtggtgtcctagtacacaatatcataaacaaactaataaacattccacattcagattccaacagctgattaacttccacattaatacagcctattttcgctccaaatgtacattcgaaaaatctgaataaaacatcgatgtcacaatttgtattatccaatacagaatgtttgtgattcgtgttaaaaccatcggagaaggaatagaaataaaaattattatagtggtggaattcagttggaatattgcctccggagtcataaaaggatactaaacattgttttttatcataaattacacatttccaatgagacaaataacaaaatccaaacattacaaatctagaggtagaacttttaattttgtctttaagtatatacgataagatatgtttattcataaacgcgtcaaatttttcatgaatcgctaaggagtttaagaatctcatgtcaaattgtcctatataatccacttcggatccataagcaaactgagagactaagttcttaatacttcgattgctcatccaggctcctctctcaggctctattttcatcttgacgacctttggattttcaccagtatgtattcctttacgtgataaatcatcgattttcaaatccatttgtgagaagtctatcgccttagatactttttcccgtagtcgaggtttaaaaaaatacgctaacggtatactagtaggtaactcaaagacatcatatatagaatggtaacgcgtctttaactcgtcggttaactctttcttttgatcgagttcgtcgctactattgggtctgctcaggtgccccgactctactagttccaacatcataccgataggaatacaagacactttgccggcggttgtagatttatcatatttttccactacatatccgttacaatttgttaaaaatttagatacatctatattgctacataatccagctagtgaatatatatgacataataaattggtaaatcctagttctggtattttactaattactaaatctgtatatctttccatttatcatggaaaagaatttaccagatatcttcttttttccaaactgcgttaatgtattctcttacaaatattcacaagatgaattcagtaatatgagtaaaacggaacgtgatagtttctcattggccgtgtttccagttataaaacatagatggcataacgcacacgttgtaaaacataaaggaatatacaaagttagtacagaagcacgtggaaaaaaagtatctcctccatcactaggaaaacccgcacacataaacctaaccgcgaagcaatatatatacagtgaacacacaataagctttgaatgttatagttttctaaaatgtataacaaatacagaaatcaattcgttcgatgagtatatattaagaggactattagaagctggtaatagtttacagatattttccaattccgtaggtaaacgaacagatactataggtgtactagggaataagtatccatttagcaaaattccattggcctcattaactcctaaagcacaacgagagatattttcagcgtggatttctcatagacctgtagttttaactggaggaactggagtgggtaagacgtcacaggtacccaagttattgctttggtttaattatttatttggtggattctctactctagataaaatcactgactttcacgaaagaccagtcattctatctcttcctaggatagctttagttagattgcatagcaataccattttaaaatcattgggatttaaggtactagatggatctcctatttctttacggtacggatctataccggaagaattaataaacaaacaaccaaaaaaatatggaattgtattttctacccataagttatctctaacaaaactatttagttatggcactcttattatagacgaagttcatgagcatgatcaaataggagatattattatagcagtagcgagaaagcatcatacgaaaatagattctatgtttttaatgactgccacgttagaggatgacagggaacggctaaaagtatttttacctaatcccgcatttatacatattcctggagatacactgtttaaaattagcgaggtatttattcataataagataaatccatcttccagaatggcatacatagaagaagaaaagagaaatttagttactgctatacagatgtatactcctcctgatggatcatccggtatagtctttgtggcatccgttgcacagtgtcacgaatataaatcatatttagaaaaaagattaccgtatgatatgtatattattcatggtaaggtcttagatatagacgaaatattagaaaaagtgtattcatcacctaatgtatcgataattatttctactccttatttggaatccagcgttactatacgcaatgttacacacatttatgatatgggtagagtttttgtccccgctccttttggaggatcgcaacaatttatttctaaatctatgagagatcaacgaaaaggaagagtaggaagagttaatcctggtacatacgtctatttctatgatctgtcttatatgaagtctatacagcgaatagattcagaatttctacataattatatattgtacgctaataagtttaatctaacactccccgaagatttgtttataatccctacaaatttggatattctatggcgtacaaaggaatatatagactcgttcgatattagtacagaaacatggaataaattattatccaattattatatgaagatgatagagtatgctaaactttatgtactaagtcctattctcgctgaggagttggataactttgagaggacgggagaattaactagtattgtacgagaagccattttatctctaaatttacaaattaagattttaaattttaaacataaagatgatgatacgtatatacacttttgtaaaatattattcggtgtctataacggaacaaacgctactatatattatcatagacctctaacgggatatatgaatatgatttcagatactatatttgttcctgtagataataactaaaaatcaaactctaatgaccacatctttttttagagatgaaaaattttccacatctccttttgtagacacgactaaacattttgcagaaaaaagtttattagtgtttagataatcgtatacttcatcagtgtagatagtaaatgtgaacagataaaaggtattcttgctcaatagattggtaaattccatagaatatattaatcctttcttcttgagatcccacatcatttcaaccagagacgttttatccaatgatttacctcgtactataccacatacaaaactagattttgcagtgacgtcgtacctggtattcctaccaaacaaaattttacttttagttcttttagaaaattctaaggtagaatctctatttgccaatatgtcatctatggaattaccactagcaaaaaatgatagaaatatatattgatacatcgcagctggttttgatctactatactttaaaaacgaatcagattccataattgcctgtatatcatcagctgaaaaactatgttttacacgtattccttcggcatttctttttaatgatatatcttgtttagacaatgataaagttatcatgtccatgagagacgcgtctccgtatcgtataaatatttcattagatgttagacgcttcattaggggtatacttctataaggtttcttaatcagtccatcattggttgcgtcaagaactactatcggatgttgttgggtatctctagtgttacacatggccttactaaagtttgggtaaataactatgatatctctattaattatagatgcatatatttcattcgtcaaggatattagtatcgacttgctatcgtcattaatacgtgtaatgtaatcatataaatcatgcgatagccaaggaaaatttaaatagatgttcatcatataatcgtcgctataattcatattaatacgttgacattgactaatttgtaatatagcctcgccacgaagaaagctctcgtattcagtttcatcgataaaggataccgttaaatataactggttgccgatagtctcatagtctattaagtggtaagtttcgtacaaatacagaatccctaaaatattatctaatgttggattaatctttaccataactgtataaaatggagacggagtcataactattttaccgtttgtacttactggaatagatgaaggaataatctccggacatgctggtaaagacccaaatgtctgtttgaagaaatccaatgttccaggtcctaatctcttaacaaaaattacgatattcgatcccgatatcctttgcattctatttaccagcatatcacgaactatattaagattatctatcatgtctattctcccaccgttatataaatcgcctccgctaagaaacgttagtatatccatacaatggaatacttcatttctaaaatagtattcgttttctaattctttaatgtgaaatcgtatactagaaagggaaaaattatctttgagttttccgttagaaaagaaccacgaaactaatgttctgattgcgtccgattccgttgctgaattaatggatttacaccaaaaactcatataacttctagatgtagaagcattcgctaaaaaattagtagaatcaaaggatataagtagatgttccaacaagtgagcaattcccaagatttcatctatatcattctcgaatccgaaattagaaattcccaagtagatatcctttttcatccgatcgttgatgaaaatacgaactttattcggtaagacaatcatttactaaggagtaaaataggaagtaatgttcgtatgtcgttatcatcgtataaattaaaggtgtgttttttaccattaagtgacattataattttaccaatattggaattataatataggtgtatttgcgcactcgcgacggttgatgcatcggtaaatatagctgtatctaatgttctagtcggtatttcatcatttcgctgtctaataatagcgttttctctatctgtttccattacagctgcctgaagtttattggtcggataatatgtaaaataataagaaatacatacgaataacaaaaataaaataagatataataaagatgccatttagagatctaattttgtttaacttgtccaaattcctacttacagaagatgaggaatcgttggagatagtgtcttccttatgtagaggatttgaaatatcttataatgacttgataacttactttccagataggaaataccataaatatatttataaagtatttgaacatgtagatttatcggaggaattaagtatggaattccatgatacaactctgagagatttagtctatcttagattgtacaagtattccaagtgtatacggccgtgttataaattaggagataatctaaaaggcatagttgttataaaggacaggaatatttatattagggaagcaaatgatgacttgatagaatatctcctcaaggaatacactcctcagatttatacatattctaatgagcgcgtccccataactggttcaaaattaattctttgtggattttctcaagttacatttatggcgtatacaacgtcgcatataacaacaaataaaaaggtagatgttctcgtttccaaaaaatgtatagatgaactagtcgatccaataaattatcaaatacttcaaaatttatttgataaaggaagcggaacaataaacaaaatactcaggaagatattttattcggtaacaggtggccaaactccataggtagctttttctatttcggattttagaatttccaaattcaccagcgatttatcggttttggtgaaatccaaggatttattaatgtccacaaatgccatttgttttgtctgtggattgtatttgaaaatggaaacgatgtagttagatagatgcgctgcgaagtttcctattagggttccgcgcttcacgtcacccagcatacttgaatcaccatcctttaaaaaaaatgataagatatcaacatggagtatatcatactcgaattttaattcttctactgactcactgacattttcacaaatactacaatacggtttaccgaaaataatcagtacgttcttcatttatgggtatcaaaaacttaaaatcgttactgctggaaaataaatcactgacgatattagatgataatttatacaaagtatacaatggaatatttgtggatacaatgagtatttatatagccgtcgccaattgtgtcagaaacttagaagagttaactacggtattcataaaatacgtaaacggatgggtaaaaaagggagggcatgtaaccctttttatcgatagaggaagtataaaaattaaacaagacgttagagacaagagacgtaaatattctaaattaaccaaggacagaaaaatgttagaattagaaaagtgtacatccgaaatacaaaatgttaccggatttatggaagaagaaataaaggcagaaatgcaattaaaaatcgataaactcacatttcaaatatatttatctgattctgataacataaaaatatcattgaatgagatactaacacatttcaacaataatgagaatgttacattattttattgtgatgaacgagacgcagaattcgttatgtgtctcgaggctaaaacacatttctctaccacaggagaatggccgttgataataagtaccgatcaggatactatgctatttgcatctgctgataatcatcctaagatgataaaaaacttaactcaactgtttaaatttgttccctcggcagaggataactatttagcaaaattaacggcgttagtgaatggatgtgatttctttcctggactctatggggcatctataacacccaccaacttaaacaaaatacaattgtttagtgattttacaatcgataatatagtcactagtttggcaattaaaaattattatagaaagactaactctaccgtagacgtgcgtaatattgttacgtttataaacgattacgctaatttagacgatgtctactcgtatattcctccttgtcaatgcactgttcaagaatttatattttccgcattagatgaaaaatggaatgaatttaaatcatcttatttagaaagcgtgccgttaccctgccaattaatgtacgcgttagaaccacgcaaggagattgatgtttcagaagttaaaactttatcatcttatatagatttcgaaaatactaaatcagatatcgatgttataaaatctatatcctcgatcttcggatattctaacgaaaactgtaacacgatagtattcggcatctataaggataatttactactgagtataaataattcattttactttaacgatagtctgttaataaccaatactaaaagtgataatataataaatataggttactagattaaaaatggtgttccaactcgtgtgctctacatgcggtaaagatatttctcacgaacgatataaattgattatacgaaaaaaatcattaaaggatgtactcgtcagtgtaaagaacgaatgttgtaggttaaaattatctacacaaatagaacctcaacgtaacttaacagtgcaacctctattggatataaactaatatggatccggttaattttatcaagacatatgcgcctagaggttctattatttttattaattataccatgtcattaacaagtcatttgaatccatcgatagaaaaacatgtgggtatttattatggtacgttattatcggaacacttggtagttgaatctacctatagaaaaggagttcgaatagtcccattggatagtttttttgaaggatatcttagtgcaaaagtatacatgttagagaatattcaagttatgaaaatagcagctgatacgtcattaactttattgggtattccgtatggatttggtcatgatagaatgtattgttttaaattggtagctgactgttataaaaatgccggtattgatacatcgtctaaacgaatattgggcaaagatatttttctgagccaaaacttcacagacgataatagatggataaagatatatgattctaataatttaacattttggcaaattgattaccttaaagggtgagttaatatgcataactactcctccgttgttttttccctcgttctttttcttaacgttgtttgccatcactctcataatgtaaagatattctaaaatggtaaacttttgcatatcggacgcagaaattggtataaatgttgtaattgtattatttcccgtcaatggactagtcacagctccatcagttttatatcctttagagtatttctcactcgtgtctaacattctagagcattccatgatctgtttatcgttgatattggccggaaagatagattttttattttttattatattactattggcaattgtagatataacttctggtaaatatttttctaccttttcaatctcttctattttcaagccggctatatattctgctatattgttgctagtatcaataccttttctggctaagaagtcatatgtggtattcactatatcagttttaactggtagttccattagcctttccacttctgcagaataatcagaaattggttctttaccagaaaatccagctactataataggctcaccgatgatcattggcaaaatcctatattgtaccagattaatgagagcatatttcatttccaataattctgctagttcttgagacattgatttatttgatgaatctagttggttctctagatactctaccatttctgccgcatacaataacttgttagataaaatcagggttatcaaagtgtttagcgtggctagaatagtgggcttgcatgtattaaagaatgcggtagtatgagtaaaccgttttaacgaattatatagtctccagaaatctgtggcgttacatacatgagccgaatgacatcgaagattgtccaatatttttaatagctgctctttgtccattatttctatatttgactcgcaacaattgtagataccattaatcaccgattcctttttcgatgccggacaatagcacaattgtttagctttggactctatgtattcagaattaatagatatatctctcaatacagattgcactatacattttgaaactatgtcaaaaattgtagaacgacgctgttctgcagccatttaactttaaataatttacaaaaatttaaaatgagcatccgtataaaaatcgataaactgcgccaaattgtggcatatttttcagagttcagtgaagaagtgtctataaatgtagactcgacggatgagttaatgtatatttttgccgccttgggcggatctgtaaacatttgggcaattatacctctaagtgcatcagtgttttaccgaggagccgaaaatattgtgtttaatcttcctgtgtccaaggtaaaatcgtgtttgtgtagttttcacaatgatgccatcatagatatagaacctgatctggaaaataatctagtaaaactttctagttatcatgtagtaagtgtcgattgtaacaaggaactgatgcctattaggacagatactactatttgtctaagtatagatcaaaagaaatcttacgtgtttaattttcacaagtatgaagaaaaatgttgtggtagaaccgtcattcatctagaatggttgttgggctttatcaagtgtattagtcagcatcagcatctggctattatgtttaaagatgacaatattattatgaagactcctggtaatactgatgcgttttccagggaatattctatgactgaatgttctcaagaactacaaaagttttctttcaaaatagctatctcgtctctcaacaaactacgaggattcaaaaagagagtcaatgtttttgaaactagaatcgtaatggataatgacgataacattttaggaatgttgttttcggatagagttcaatcctttaagatcaacatctttatggcgtttttagattaatactttcaatgagataaatatgggtggcggagtaagtgttgagctccctaaacgggatccgcctccgggagtacccactgatgagatgttattaaacgtggataaaatgcatgacgtgatagctcccgctaagcttttagaatatgtgcatataggaccactagcaaaagataaagaggataaagtaaagaaaagatatccagagtttagattagtcaacacaggacccggtggtctttcggcattgttaagacaatcgtataatggaaccgcacccaattgctgtcgcacttttaatcgtactcattattggaagaaggatggaaagatatcagataagtatgaagagggtgcagtattagaatcgtgttggccagacgttcacgacactggaaaatgcgatgttgatttattcgactggtgtcagggggatacgttcgatagaaacatatgccatcagtggatcggttcagcctttaataggagtaatagaactgtagagggtcaacaatcgttaataaatctgtataataagatgcaaacattatgtagtaaagatgctagtgtaccaatatgcgaatcatttttgcattatttacgcgcacacaatacagaagatagcaaagagatgatcgattatattctaagacaacagtctgcggactttaaacagaaatatatgagatgtagttatcccactagagataagttagaagagtcattaaaatatgcggaacctcgagaatgttgggatccagagtgttcgaatgccaatgttaatttcttactaacacgtaattataataatttaggactttgcaatattgtacgatgtaataccagcgtgaacaacttacagatggataaaacttcctcattaagattgtcatgtggattaagcaatagtgatagattttctactgttcccgtcaatagagcaaaagtagttcaacataatattaaacactcgttcgacctaaaattgcatttgatcagtttattatctctcttggtaatatggatactaattgtagctatttaaatgggtgccgcggcaagcatacagacgacggtgaatacactcagcgaacgtatctcgtctaaattagaacaagaagcgaacgctagtgctcaaacaaaatgtgatatagaaatcggaaatttttatatccgacaaaaccatggatgtaacctcactgttaaaaatatgtgctctgcggacgcggatgctcagttggatgctgtgttatcagccgctacagaaacatatagtggattaacaccggaacaaaaagcatacgtgccagctatgtttactgctgcgttaaacattcagacgagtgtaaacactgttgttagagattttgaaaattatgtgaaacagacttgtaattctagcgcggtcgtcgataacaaattaaagatacaaaacgtaatcatagatgaatgttacggagccccaggatctccaacaaatttggaatttattaatacaggatctagcaaaggaaattgtgccattaaagcgttgatgcaattgacgactaaggccactactcaaatagcacctagacaagttgctggtacaggagttcagttttatatgattgttatcggtgttataatattggcagcgttgtttatgtactatgccaagcgtatgttgttcacatccaccaatgataaaatcaaacttattttagccaataaggaaaacgtccattggactacttacatggacacattctttagaacttctccgatggttattgctaccacggatatgcaaaactgaaaatatattgataatattttaatagattaacatggaagttatcgctgatcgtctagacgatatagtgaaacaaaatatagcggatgaaaaatttgtagattttgttatacacggtctagagcatcaatgtcctgctatacttcgaccattaattaggttgtttattgatatactattatttgttatagtaatttatatttttacggtacgtctagtaagtagaaattatcaaatgttgttggtggtgctagtcatcacattaactattttttattactttatactataatagtactagactgacttctaacaaacatctcacctgccataaataaatgcttgatattaaagtcttctatttctaacactattccatctgtggaaaataatactctgacattatcgctaattgacacatcggtgagtgatatgcctataaagtaataatcttctttgggcacatataccagtgtaccaggttctaacaacctatttactggtgctcctgtagcatactttttctttaccttgagaatatccatcgtttgcttggtcaatagcgatatgtgattttttatcaaccactcaaaaaagtaattggagtgttcatatcctctacgggctattgtctcatggccgtgtatgaaatttaagtaacacgactgtggtagatttgttctatagagccgattgccgcaaatagatagaactaccaatatgtctgtacaaatgttaaacattaattgattaacagaaaaaacaatgttcgttctgggaatagaaaccagatcaaaacaaaattcgttagaatatatgccacgtttatacatggaatataaaataactacagtttgaaaaataacagtatcatttaaacatttaacttgcggggttaatctcacaactttactgtttttgaactgttcaaaatatagcatcgatccgtgagaaatacgtttagccgcctttaatagaggaaatcccaccgcctttctggatctcaccaacgacgatagttctgaccagcaactcatttcttcatcatccacctgttttaacatataataggcaggagatagatatccgtcattgcaatattccttctcgtaggcacacaatctaatattgataaaatctccattctcttctctgcatttattatcttgtctcggtggctgattaggctgtggtcttggtttaggccttggtctatcgttgttgaatctattttggtcattaaatctttcatttcttcctggtatatttctatcacctcgtttggttggatttttgtctatattatcgtttgtaacatcggtacgggtattcatttatcacaaaaaaaacttctctaaatgagtctactgctagaaaacctcatcgaagaagataccatattttttgcaggaagtatatctgagtatgatgatttacaaatggttattgccggcgcaaaatccaaatttccaagatctatgctttctatttttaatatagtacctagaacgatgtcaaaatatgagttggagttgattcataacgaaaatatcacaggagcaatgtttaccacaatgtataatataagaaacaatttgggtctaggagatgataaactaactattgaagccattgaaaactatttcttggatcctaacaatgaagttatgcctcttattattaataatacggatatgactgccgtcattcctaaaaaaagtggtaggagaaagaataagaacatggttatcttccgtcaaggatcatcacctatcttgtgcattttcgaaactcgtaaaaagattaatatttataaagaaaatatggaatccgcgtcgactgagtatacacctatcggagacaacaaggctttgatatctaaatatgcgggaattaatgtcctgaatgtgtattctccttccacatccataagattgaatgccatttacggattcaccaataaaaataaactagagaaacttagtactaataaggaactagaatcgtatagttctagccctcttcaagaacccattaggttaaatgattttctgggactattggaatgtgttaaaaagaatattcctctaacagatattccgacaaaggattgattactataaatggagaatgttcctaatgtatactttaatcctgtgtttatagagcccacgtttaaacattctttattaagtgtttataaacacagattaatagttttatttgaagtattcgttgtattcattctaatatatgtattttttagatctgaattaaatatgttcttcatgcctaaacgaaaaatacccgatcctattgatagattacgacgtgctaatctagcgtgtgaagacgataaattaatgatctatggattaccatggatgacaactcaaacatctgcgttatcaataaatagtaaaccgatagtgtataaagattgtgcaaagcttttgcgatcaataaatggatcacaaccagtatctcttaacgatgttcttcgcagatgatgattcattttttaagtatttggctagtcaagatgatgaatcttcattatctgatatattgcaaatcactcaatatctagactttctgttattattattgatccaatcaaaaaataaattagaagctgtgggtcattgttatgaatctctttcagaggaatacagacaattgacaaaattcacagactttcaagattttaaaaaactgtttaacaaggtccctattgttacagatggaagggtcaaacttaataaaggatatttgttcgactttgtgattagtttgatgcgattcaaaaaagaatcctctctagctaccaccgcaatagatcctgttagatacatagatcctcgtcgcaatatcgcattttctaacgtgatggatatattaaagtcgaataaagtgaacaataattaattctttattgtcatcatgaacggcggacatattcagttgataatcggccccatgttttcaggtaaaagtacagaattaattagacgagttagacgttatcaaatagctcaatataaatgcgtgactataaaatattctaacgataatagatacggaacgggactatggacgcatgataagaataattttgaagcattggaagcaactaaactatgtgatgtcttggaatcaattacagatttctccgtgataggtatcgatgaaggacagttctttccagacattgttgaattagatcgataaaaattaattaattacccgggtaccaggcctagatctgtcgagatccggtggtggtgcaaatcaaagaactgctcctcagtggatgttgcctttacttctaggcctgtacggaagtgttacttctgctctaaaagctgctgcagggggggggggggggtgggggggccggttagggccgccatcccctcagagcgtcgggatatcgggtggcggctcgggacggaggacgcgctagtgttcttctgtgtggcagttcagaatgatggatcaagctagatcagcattctctaacttgtttggtggagaaccattgtcatatacccggttcagcctggctcggcaagtagatggcgataacagtcatgtggagatgaaacttgctgtagatgaagaagaaaatgctgacaataacacaaaggccaatgtcacaaaaccaaaaaggtgtagtggaagtatctgctatgggactattgctgtgatcgtctttttcttgattggatttatgattggctacttgggctattgtaaaggggtagaaccaaaaactgagtgtgagagactggcaggaaccgagtctccagtgagggaggagccaggagaggacttccctgcagcacgtcgcttatattgggatgacctgaagagaaagttgtcggagaaactggacagcacagacttcaccagcaccatcaagctgctgaatgaaaattcatatgtccctcgtgaggctggatctcaaaaagatgaaaatcttgcgttgtatgttgaaaatcaatttcgtgaatttaaactcagcaaagtctggcgtgatcaacattttgttaagattcaggtcaaagacagcgctcaaaactcggtgatcatagttgataagaacggtagacttgtttacctggtggagaatcctgggggttatgtggcgtatagtaaggctgcaacagttactggtaaactggtccatgctaattttggtactaaaaaagattttgaggatttatacactcctgtgaatggatctatagtgattgtcagagcagggaaaatcacctttgcagaaaaggttgcaaatgctgaaagcttaaatgcaattggtgtgttgatatacatggaccagactaaatttcccattgttaacgcagaactttcattctttggacatgctcatctggggacaggtgacccttacacacctggattcccttccttcaatcacactcagtttccaccatctcggtcatcaggattgcctaatatacctgtccagacaatctccagagctgctgcagaaaagctgtttgggaatatggaaggagactgtccctctgactggaaaacagactctacatgtaggatggtaacctcagaaagcaagaatgtgaagctcactgtgagcaatgtgctgaaagagataaaaattcttaacatctttggagttattaaaggctttgtagaaccagatcactatgttgtagttggggcccagagagatgcatggggccctggagctgcaaaatccggtgtaggcacagctctcctattgaaacttgcccagatgttctcagatatggtcttaaaagatgggtttcagcccagcagaagcattatctttgccagttggagtgctggagactttggatcggttggtgccactgaatggctagagggatacctttcgtccctgcatttaaaggctttcacttatattaatctggataaagcggttcttggtaccagcaacttcaaggtttctgccagcccactgttgtatacgcttattgagaaaacaatgcaaaatgtgaagcatccggttactgggcaatttctatatcaggacagcaactgggccagcaaagttgagaaactcactttagacaatgctgctttccctttccttgcatattctggaatcccagcagtttctttctgtttttgcgaggacacagattatccttatttgggtaccaccatggacacctataaggaactgattgagaggattcctgagttgaacaaagtggcacgagcagctgcagaggtcgctggtcagttcgtgattaaactaacccatgatgttgaattgaacctggactatgagaggtacaacagccaactgctttcatttgtgagggatctgaaccaatacagagcagacataaaggaaatgggcctgagtttacagtggctgtattctgctcgtggagacttcttccgtgctacttccagactaacaacagatttcgggaatgctgagaaaacagacagatttgtcatgaagaaactcaatgatcgtgtcatgagagtggagtatcacttcctctctccctacgtatctccaaaagagtctcctttccgacatgtcttctggggctccggctctcacacgctgccagctttactggagaacttgaaactgcgtaaacaaaataacggtgcttttaatgaaacgctgttcagaaaccagttggctctagctacttggactattcagggagctgcaaatgccctctctggtgacgtttgggacattgacaatgagttttaaatgtgatacccatagcttccatgagaacagcagggtagtctggtttctagacttgtgctgatcgtgctaaattttcagtagggctacaaaacctgatgttaaaattccatcccatcatcttggtactactagatgtctttaggcagcagcttttaatacagggtagataacctgtacttcaagttaaagtgaataaccacttaaaaaatgtccatgatggaatattcccctatctctagaattttaagtgctttgtaatgggaactgcctctttcctgttgttgttaatgaaaatgtcagaaaccagttatgtgaatgatctctctgaatcctaagggctggtctctgctgaaggttgtaagtggtcgcttactttgagtgatcctccaacttcatttgatgctaaataggagataccaggttgaaagaccttctccaaatgagatctaagcctttccataaggaatgtagctggtttcctcattcctgaaagaaacagttaactttcagaagagatgggcttgttttcttgccaatgaggtctgaaatggaggtccttctgctggataaaatgaggttcaactgttgattgcaggaataaggccttaatatgttaacctcagtgtcatttatgaaaagaggggaccagaagccaaagacttagtatattttcttttcctctgtcccttcccccataagcctccatttagttctttgttatttttgtttcttccaaagcacattgaaagagaaccagtttcaggtgtttagttgcagactcagtttgtcagactttaaagaataatatgctgccaaattttggccaaagtgttaatcttaggggagagctttctgtccttttggcactgagatatttattgtttatttatcagtgacagagttcactataaatggtgtttttttaatagaatataattatcggaagcagtgccttccataattatgacagttatactgtcggttttttttaaataaaagcagcatctgctaataaaacccaacagatactggaagttttgcatttatggtcaacacttaagggttttagaaaacagccgtcagccaaatgtaattgaataaagttgaagctaagatttagagatgaattaaatttaattaggggttgctaagaagcgagcactgaccagataagaatgctggttttcctaaatgcagtgaattgtgaccaagttataaatcaatgtcacttaaaggctgtggtagtactcctgcaaaattttatagctcagtttatccaaggtgtaactctaattcccattttgcaaaatttccagtacctttgtcacaatcctaacacattatcgggagcagtatcttccataatgtataaagaacaaggtagtttttacctaccacagtgtctgtatcggagacagtgatctccatatgttacactaagggtgtaagtaattatcgggaacagtgtttcccataattttcttcatgcaatgacatcttcaaagcttgaagatcgttagtatctaacatgtatcccaactcctataattccctatcttttagttttagttgcagaaacattttgtggtcattaagcattgggtgggtaaattcaaccactgtaaaatgaaattactacaaaatttgaaatttagcttgggtttttgttacctttatggtttctccaggtcctctacttaatgagatagtagcatacatttataatgtttgctattgacaagtcattttaactttatcacattatttgcatgttacctcctataaacttagtgcggacaagttttaatccagaattgaccttttgacttaaagcagagggactttgtatagaaggtttgggggctgtggggaaggagagtcccctgaaggtctgacacgtctgcctacccattcgtggtgatcaattaaatgtaggtatgaataagttcgaagctccgtgagtgaaccatcattataaacgtgatgatcagctgtttgtcatagggcagttggaaacggcctcctagggaaaagttcatagggtctcttcaggttcttagtgtcacttacctagatttacagcctcacttgaatgtgtcactactcacagtctctttaatcttcagttttatctttaatctcctcttttatcttggactgacatttagcgtagctaagtgaaaaggtcatagctgagattcctggttcgggtgttacgcacacgtacttaaatgaaagcatgtggcatgttcatcgtataacacaatatgaatacagggcatgcattttgcagcagtgagtctcttcagaaaacccttttctacagttagggttgagttacttcctatcaagccagtacgtgctaacaggctcaatattcctgaatgaaatatcagactagtgacaagctcctggtcttgagatgtcttctcgttaaggagatgggccttttggaggtaaaggataaaatgaatgagttctgtcatgattcactattctagaacttgcatgacctttactgtgttagctctttgaatgttcttgaaattttagactttctttgtaaacaaatgatatgtccttatcattgtataaaagctgttatgtgcaacagtgtggagattccttgtctgatttaataaaatacttaaacactgaaaaaaaaaaaaaaaaaaaaaaaaaaaaaaaaaaaaaaaaaaaaaaaaaaaaaaaaaaaaaaaaaaaaaaaaaaaaaaaaagtaccttctgaggcggaaagaaccagccggatctcgacttcgagcttatttatattccaaaaaaaaaaaataaaatttcaatttttaagctttcactaattccaaacccacccgctttttatagtaagtttttcacccataaataataaatacaataattaatttctcgtaaaagtagaaaatatattctaatttattgcacggtaaggaagtagatcataactcgagcatgggagatcccgtcgttttacaacgtcgtgactgggaaaaccctggcgttacccaacttaatcgccttgcagcacatccccctttcgccagctggcgtaatagcgaagaggcccgcaccgatcgcccttcccaacagttgcgcagcctgaatggcgaatggcgctttgcctggtttccggcaccagaagcggtgccggaaagctggctggagtgcgatcttcctgaggccgatactgtcgtcgtcccctcaaactggcagatgcacggttacgatgcgcccatctacaccaacgtgacctatcccattacggtcaatccgccgtttgttcccacggagaatccgacgggttgttactcgctcacatttaatgttgatgaaagctggctacaggaaggccagacgcgaattatttttgatggcgttaactcggcgtttcatctgtggtgcaacgggcgctgggtcggttacggccaggacagtcgtttgccgtctgaatttgacctgagcgcatttttacgcgccggagaaaaccgcctcgcggtgatggtgctgcgctggagtgacggcagttatctggaagatcaggatatgtggcggatgagcggcattttccgtgacgtctcgttgctgcataaaccgactacacaaatcagcgatttccatgttgccactcgctttaatgatgatttcagccgcgctgtactggaggctgaagttcagatgtgcggcgagttgcgtgactacctacgggtaacagtttctttatggcagggtgaaacgcaggtcgccagcggcaccgcgcctttcggcggtgaaattatcgatgagcgtggtggttatgccgatcgcgtcacactacgtctgaacgtcgaaaacccgaaactgtggagcgccgaaatcccgaatctctatcgtgcggtggttgaactgcacaccgccgacggcacgctgattgaagcagaagcctgcgatgtcggtttccgcgaggtgcggattgaaaatggtctgctgctgctgaacggcaagccgttgctgattcgaggcgttaaccgtcacgagcatcatcctctgcatggtcaggtcatggatgagcagacgatggtgcaggatatcctgctgatgaagcagaacaactttaacgccgtgcgctgttcgcattatccgaaccatccgctgtggtacacgctgtgcgaccgctacggcctgtatgtggtggatgaagccaatattgaaacccacggcatggtgccaatgaatcgtctgaccgatgatccgcgctggctaccggcgatgagcgaacgcgtaacgcgaatggtgcagcgcgatcgtaatcacccgagtgtgatcatctggtcgctggggaatgaatcaggccacggcgctaatcacgacgcgctgtatcgctggatcaaatctgtcgatccttcccgcccggtgcagtatgaaggcggcggagccgacaccacggccaccgatattatttgcccgatgtacgcgcgcgtggatgaagaccagcccttcccggctgtgccgaaatggtccatcaaaaaatggctttcgctacctggagagacgcgcccgctgatcctttgcgaatacgcccacgcgatgggtaacagtcttggcggtttcgctaaatactggcaggcgtttcgtcagtatccccgtttacagggcggcttcgtctgggactgggtggatcagtcgctgattaaatatgatgaaaacggcaacccgtggtcggcttacggcggtgattttggcgatacgccgaacgatcgccagttctgtatgaacggtctggtctttgccgaccgcacgccgcatccagcgctgacggaagcaaaacaccagcagcagtttttccagttccgtttatccgggcaaaccatcgaagtgaccagcgaatacctgttccgtcatagcgataacgagctcctgcactggatggtggcgctggatggtaagccgctggcaagcggtgaagtgcctctggatgtcgctccacaaggtaaacagttgattgaactgcctgaactaccgcagccggagagcgccgggcaactctggctcacagtacgcgtagtgcaaccgaacgcgaccgcatggtcagaagccgggcacatcagcgcctggcagcagtggcgtctggcggaaaacctcagtgtgacgctccccgccgcgtcccacgccatcccgcatctgaccaccagcgaaatggatttttgcatcgagctgggtaataagcgttggcaatttaaccgccagtcaggctttctttcacagatgtggattggcgataaaaaacaactgctgacgccgctgcgcgatcagttcacccgtgcaccgctggataacgacattggcgtaagtgaagcgacccgcattgaccctaacgcctgggtcgaacgctggaaggcggcgggccattaccaggccgaagcagcgttgttgcagtgcacggcagatacacttgctgatgcggtgctgattacgaccgctcacgcgtggcagcatcaggggaaaaccttatttatcagccggaaaacctaccggattgatggtagtggtcaaatggcgattaccgttgatgttgaagtggcgagcgatacaccgcatccggcgcggattggcctgaactgccagctggcgcaggtagcagagcgggtaaactggctcggattagggccgcaagaaaactatcccgaccgccttactgccgcctgttttgaccgctgggatctgccattgtcagacatgtataccccgtacgtcttcccgagcgaaaacggtctgcgctgcgggacgcgcgaattgaattatggcccacaccagtggcgcggcgacttccagttcaacatcagccgctacagtcaacagcaactgatggaaaccagccatcgccatctgctgcacgcggaagaaggcacatggctgaatatcgacggtttccatatggggattggtggcgacgactcctggagcccgtcagtatcggcggaattccagctgagcgccggtcgctaccattaccagttggtctggtgtcaaaaataataataaccgggcaggggggatccaattctgtgagcgtatggcaaacgaaggaaaaatagttatagtagccgcactcgatgggacatttcaacgtaaaccgtttaataatattttgaatcttattccattatctgaaatggtggtaaaactaactgctgtgtgtatgaaatgctttaaggaggcttccttttctaaacgattgggtgaggaaaccgagatagaaataataggaggtaatgatatgtatcaatcggtgtgtagaaagtgttacatcgactcataatattatattttttatctaaaaaactaaaaataaacattgattaaattttaatataatacttaaaaatggatgttgtgtcgttagataaaccgtttatgtattttgaggaaattgataatgagttagattacgaaccagaaagtgcaaatgaggtcgcaaaaaaactgccgtatcaaggacagttaaaactattactaggagaattattttttcttagtaagttacagcgacacggtatattagatggtgccaccgtagtgtatataggatctgctcccggtacacatatacgttatttgagagatcatttctataatttaggagtgatcatcaaatggatgctaattgacggccgccatcatgatcctattttaaatggattgcgtgatgtgactctagtgactcggttcgttgatgaggaatatctacgatccatcaaaaaacaactgcatccttctaagattattttaatttctgatgtgagatccaaacgaggaggaaatgaacctagtacggcggatttactaagtaattacgctctacaaaatgtcatgattagtattttaaaccccgtggcgtctagtcttaaatggagatgcccgtttccagatcaatggatcaaggacttttatatcccacacggtaataaaatgttacaaccttttgctccttcatattcagctgaaatgagattattaagtatttataccggtgagaacatgagactgactcgagttaccaaattagacgctgtaaattatgaaaaaaagatgtactaccttaataagatcgtccgtaacaaagtagttgttaactttgattatcctaatcaggaatatgactattttcacatgtactttatgctgaggaccgtgtactgcaataaaacatttcctactactaaagcaaaggtactatttctacaacaatctatatttcgtttcttaaatattccaacaacatcaactgaaaaagttagtcatgaaccaatacaacgtaaaatatctagcaaaaattctatgtctaaaaacagaaatagcaagagatccgtacgcggtaataaatagaaacgtactactgagatatactaccgatatagagtataatgatttagttactttaataaccgttagacataaaattgattctatgaaaactgtgtttcaggtatttaacgaatcatccataaattatactccggttgatgatgattatggagaaccaatcattataacatcgtatcttcaaaaaggtcataacaagtttcctgtaaattttctatacatagatgtggtaatatctgacttatttcctagctttgttagactagatactacagaaactaatatagttaatagtgtactacaaacaggcgatggtaaaaagactcttcgtcttcccaaaatgttagagacggaaatagttgtcaagattctctatcgccctaatataccattaaaaattgttagatttttccgcaataacatggtaactggagtagagatagccgatagatctgttatttcagtcgctgattaatcaattagtagagatgagataagaacattataataatcaataatatatcttatatcttatatcttatatcttatatcttgtttagaaaaatgctaatattaaaatagctaacgctagtaatccaatcggaagccatttgatatctataatagggtatctaatttcctgatttaaatagcggacagctatattctcggtagctactcgtttggaatcacaaacattatttacatctaatttactatctgtaatggaaacgtttcccaatgaaatggtacaatccgatacattgcattttgttatatttttttttaaagaggctggtaacaacgcatcgcttcgtttacatggctcgtaccaacaataatagggtaatcttgtatctattcctatccgtactatgcttttatcaggataaatacatttacatcgtatatcgtctttgttagcatcacagaatgcataaatttgttcgtccgtcatgataaaaatttaaagtgtaaatataactattatttttatagttgtaataaaaagggaaatttgattgtatactttcggttctttaaaagaaactgacttgataaaaatggctgtaatctctaaggttacgtatagtctatatgatcaaaaagagattaatgctacagatattatcattagtcatgttaaaaatgacgacgatatcggtaccgttaaagatggtagactaggtgctatggatggggcattatgtaagacttgtgggaaaacggaattggaatgtttcggtcactggggtaaagtaagtatttataaaactcatatagttaagcctgaatttatttcagaaattattcgtttactgaatcatatatgtattcactgcggattattgcgttcacgagaaccgtattccgacgatattaacctaaaagagttatcgggacacgctcttaggagattaaaggataaaatattatccaagaaaaagtcatgttggaacagtgaatgtatgcaaccgtatcaaaaaattactttttcaaagaaaaaggtttgtttcgtcaacaagttggatgatattaacgttcctaattctctcatctatcaaaagttaatttctattcatgaaaagttttggccattattagaaattcatcaatatccagctaacttattttatacagactactttcccatccctccgttgattattagaccggctattagtttttggatagatagtatacccaaagagaccaatgaattaacttacttattaggtatgatcgttaagaattgtaacttgaatgctgatgaacaggttatccagaaggcggtaatagaatacgatgatattaaaattatttctaataacactaccagtatcaatttatcatatattacatccggcaaaaataatatgattagaagttatatcgtcgcccgacgaaaagatcagaccgctagatctgtaattggtcccagtacatctatcaccgttaatgaggtaggaatgcccgcatatattagaaatacacttacagaaaagatatttgttaatgcctttacagtggataaagttaaacaactattagcgtcaaaccaagttaaattttactttaataaacgattaaaccaattaacaagaatacgccaaggaaagtttattaaaaataaaatacatttattgcctggtgattgggtagaagtagctgttcaagaatatacaagtattatttttggaagacagccgtctctacatagatacaacgtcatcgcttcatctatcagagctaccgaaggagatactatcaaaatatctcccggaattgccaactctcaaaatgctgatttcgacggggatgaggaatggatgatattagaacaaaatcctaaagctgtaattgaacaaagtattcttatgtatccgacgacgttactcaaacacgatattcatggagcccccgtttatggatctattcaagatgaaatcgtagcagcgtattcattgtttaggatacaagatctttgtttagatgaagtattgaacatcttggggaaatatggaagagagttcgatcctaaaggtaaatgtaaattcagcggtaaagatatctatacttacttgataggtgaaaagattaattatccgggtctcttaaaggatggtgaaattattgcaaacgacgtagatagtaattttgttgtggctatgaggcatctgtcattggctggactcttatccgatcataagtcgaacgtggaaggtatcaactttattatcaagtcatcttatgtttttaagagatatctatctatttacggttttggggtgacattcaaagatctgagaccaaattcgacgttcactaataaattggaggccatcaacgtagaaaaaatagaacttatcaaagaagcatacgccaaatatctcaacgatgtaagagacgggaaaatagttccattatctaaagctttagaggcggactatgtggaatccatgttatccaacttgacaaatcttaatatccgagagatagaagaacatatgagacaaacgctgatagatgatccagataataacctcctgaaaatggccaaagcgggttataaagtaaatcccacagaactaatgtatattctaggtacgtatggacaacaaaggattgatggtgaaccagcagagactcgagtattgggtagagttttaccttactatcttccagactctaaggatccagaaggaagaggttacattcttaattctttaacaaaaggattaacgggttctcaatattacttttcgatgctggttgccagatctcaatctactgatatcgtctgtgaaacatcacgtaccggaacactggctagaaaaatcattaaaaagatggaggatatggtggtcgacggatacggacaagtagttataggtaatacgctcatcaagtacgccgccaattataccaaaattctaggctcagtatgtaaacctgtagatcttatctatccagatgagtccatgacttggtatttggaaattagtgctctgtggaataaaataaaacagggattcgtttactctcagaaacagaaacttgcaaagaagacattggcgccgtttaatttcctagtattcgtcaaacccaccactgaggataatgctattaaggttaaggatctgtacgatatgattcataacgtcattgatgatgtgagagagaaatacttctttacggtatctaatatagattttatggagtatatattcttgacgcatcttaatccttctagaattagaattacaaaagaaacggctatcactatctttgaaaagttctatgaaaaactcaattatactctaggtggtggaactcctattggaattatttctgcacaggtattgtctgagaagtttacacaacaagccctgtccagttttcacactactgaaaaaagtggtgccgtcaaacaaaaacttggtttcaacgagtttaataacttgactaatttgagtaagaataagaccgaaattatcactctggtatccgatgatatctctaaacttcaatctgttaagattaatttcgaatttgtatgtttgggagaattaaatccaaacatcactcttcgaaaagaaacagataaatatgtagtagatataatagtcaatagattatacatcaagagagcagaaataaccgaattagtcgtcgaatatatgattgaacgatttatctcctttagcgtcattgtaaaggaatggggtatggagacattcattgaggacgaggataatattagatttactgtctacctaaatttcgttgaaccggaagaattgaatcttagtaagtttatgatggttcttccgggggcagccaacaagggaaagattagtaaattcaagattcctatctctgattatacgggatatgacgacttcaatcaaacaaaaaagctcaataagatgactgtagaactcatgaatctaaaagaattgggttctttcgatttggaaaacgtcaacgtgtatcctggagtatggaatacatacgatatcttcggtatcgaggccgctcgtgaatacttgtgcgaagccatgttaaacacctatggagaagggttcgattatctgtatcagccttgtgatcttctcgctagtttactatgtgctagttacgaaccagaatcagtgaataaattcaagttcggcgcagctagtactcttaagagagctacgttcggagacaataaagcattgttaaacgcggctcttcataaaaagtcagaacctattaacgataatagtagctgccacttttttagcaaggtccctaatataggaactggatattacaaatactttatcgacttgggtcttctcatgagaatggaaaggaaactatctgataagatatcttctcaaaagatcaaggaaatggaagaaacagaagacttttaattcttatcaataacatatttttctatgatctgtcttttaaacgatggattttccacaaatgcgcctctcaagtccctcatagaatgatacacgtataaaaaatatagcataggcaatgactccttatttttagacattagatatgccaaaatcatagccccgcttctatttactcccgcagcacaatgaaccaacacgggctcgtttcgttgatcacatttagataaaaaggcggttacgtcgtcaaaatatttactaatatcggtagttgtatcatctaccaacggtatatgaataatattaatattagagttaggtaatgtatatttatccatcgtcaaatttaaaacatatttgaacttaacttcagatgatggtgcatccatagcatttttataatttcccaaatacacattattggttacccttgtcattatagtgggagatttggctttgtgcatatctccagttgaacgtagtagtaagtatttatacaaacttttcttatccatttataacgtacaaatggataaaactactttatcggtaaacgcgtgtaatttagaatacgttagagaaaaggctatagtaggcgtacaagcagccaaaacatcaacacttatattctttgttattatattggcaattagtgcgctattactctggtttcagacgtctgataatccagtctttaatgaattaacgagatatatgcgaattaaaaatacggttaacgattggaaatcattaacggatagcaaaacaaaattagaaagtgatagaggtagacttctagccgctggtaaggatgatatatttgaattcaaatgtgtggatttcggcgcctattttatagctatgcgattggataagaaaacatatctgccgcaagctattaggcgaggtactggagacgcgtggatggttaaaaaggcggcaaaggtcgatccatctgctcaacaattttgtcagtatttgataaaacacaagtctaataatgttattacttgtggtaatgagatgttaaatgaattaggttatagcggttattttatgtcaccgcattggtgttccgattttagtaatatggaatagtgttagataaatgcggtaacgaatgttcctgtaaggaaccataacagcttagatttaacgttaaagatgagcataaacataataaacaaaattacaatcaaacttataacattaatatcaaacaatccaaaaaatgaaatcagtggagtagtaaacgcgtacataactcctggataacgtttagcagctgccgttcctattctagaccaaaaattcggtttcatgttttcgaaacggtattctgcaacaagtcgaggatcgtgttctacatatttggcggcattatccagtatctgcctattgatcttcatttcgttttcgattctggctatttcaaaataaaatcccgatgatagacctccagactttataatttcatctacgatgttcagcgccgtagtaactctaataatataggctgataagctaacatcataccctcctgtatatgtgaatatggcatgatttttgtccattacaagctcggttttaactttattgcctgtaataatttctctcatctgtaggatatctatttttttgtcatgcattgccttcaagacgggacgaagaaacgtaatatcctcaataacgttatcgttttctacaataactacatattctacctttttattttctaactcggtaaaaaaattagaatcccatagggctaaatgtctagcgatatttcttttcgtttcctctgtacacatagtgttacaaaaccctgaaaagaagtgagtatacttgtcatcatttctaatgtttcctccagtccactgtataaacgcataatccttgtaatgatctggatcatccttgactaccacaacatttcttttttctggcataacttcgttgtcctttacatcatcgaacttctgatcattaatatgctcatgaacattaggaaatgtttctgatggaggtctatcaataactggcacaacaataacaggagttttcaccgccgccatttagttattgaaattaatcatatacaactctttaatacgagttatattttcgtctatccattgtttcacattgacatatttcgacaaaaagatataaaatgcgtattccaatgcttctctgtttaatgaattactaaaatatacaaacacgtcactgtctggcaataaatgatatcttagaatattgtaacaatttattttgtattgcacatgttcgtgatctatgagttcttcttcgaatggcataggatctccgaatctgaaaacgtataaataggagttagaataataatatttgagagtattggtaatatataaactctttagcggtataattagtttttttctctcaatttctatttttagatgtgatggaaaaatgactaattttgtagcattagtatcatgaactctaatcaaaatcttaatatcttcgtcacacgttagctctttgaagtttttaagagatgcatcagttggttctacagatggagtaggtgcaacaattttttgttctacacatgtatgtactggagccattgttttaactataatggtgcttgtatcgaaaaactttaatgcagatagcggaagctcttcgccgcgactttctacgtcgtaattgggttctaacgccgatctctgaatggatactagttttctaagttctaatgtgattctctgaaaatgtaaatccaattcctccggcattatagatgtgtatacatcggtaaataaaactatagtatccaacgatcccttctcgcaaattctagtcttaaccaaaaaatcgtatataaccacggagatggcgtatttaagagtggattcttctaccgttttgttcttggatgtcatataggaaactataaagtccgcactactgttaagaatgattactaacgcaactatatagtttaaattaagcattttggaaacataaaataactctgtagacgatacttgactttcgaataagtttgcagacaaacgaagaaagaacagacctctcttaatttcagaagaaaactttttttcgtattcctgacgtctagagtttatatcaataagaaagttaagaattagtcggttaatgttgtatttcattacccaagtttgagatttcataatattatcaaaagacatgataatattaaagataaagcgctgactatgaacgaaatagctatatggttcgctcaagaatatagtcttgttaaacgtggaaacgataactgtatttttaatcacgtcagcggcatctaaattaaatataggtatatttattccacacactctacaatatgccacaccatcttcataataaataaattcgttagcaaaattattaattttagtgaaatagttagcgtcaactttcatagcttccttcaatctaatttgatgctcacacggtgcgaattccactctaacatcccttttccatgcctcaggttcatcgatctctataatatctagttttttgcgtttcacaaacacaggctcgtctctcgcgatgagatctgtatagtaactatgtaaatgataactagatagaaagatgtagctatatagatgacgatcctttaagagaggtataataactttaccccaatcagatagactgttgttatggtcttcggaaaaagaatttttataaatttttccagtattttccaaatatacgtacttaacatctaaaaaatccttaatgataataggaatggataatccgtctattttataaagaaatacatatcgcacattatacttttttttggaaatgggaataccgatgtgtctacataaatatgcaaagtctaaatattttttagagaatcttagttggtccaaattcttttccaagtacggtaatagatttttcatattgaacggtatcttcttaatctctggttctagttccgcattaaatgatgaaactaagtcactatttttataactaacgattacatcacctctaacatcatcatttaccagaatactgatcttcttttgtcgtaaatacatgtctaatgtgttaaaaaaaagatcatacaagttatacgtcatttcatctgtggtattcttgtcattgaaggataaactcgtactaatctcttctttaacagcctgttcaaatttatatcctatatacgaaaaaatagcaaccagtgtttgatcatccgcgtcaatattctgttctatcgtagtgtataacaatcgtatatcttcttctgtgatagtcgatacgttataaaggttgataacgaaaatatttttatttcgtgaaataaagtcatcgtaggattttggacttatattcgcgtctagtagatatgcttttatttttggaatgatctcaattagaatagtctctttagagtccatttaaagttacaaacaactaggaaattggtttatgatgtataatttttttagtttttatagattctttattctatacttaaaaaatgaaaataaatacaaaggttcttgagggttgtgttaaattgaaagcgagaaataatcataaattatttcattatcgcgatatccgttaagtttgtatcgtaatggcgtggtcaattacgaataaagcggatactagtagcttcacaaagatggctgaaatcagagctcatctaaaaaatagcgctgaaaataaagataaaaacgaggatattttcccggaagatgtaataattccatctactaagcccaaaaccaaacgagccactactcctcgtaaaccagcggctactaaaagatcaaccaaaaaggaggaagtggaagaagaagtagttatagaggaatatcatcaaacaactgaaaaaaattctccatctcctggagtcagcgacattgtagaaagcgtggccgctgtagagctcgatgatagcgacggggatgatgaacctatggtacaagttgaagctggtaaagtaaatcatagtgctagaagcgatctctctgacctaaaggtggctaccgacaatatcgttaaagatcttaagaaaattattactagaatctctgcagtatcgacggttctagaggatgttcaagcagctggtatctctagacaatttacttctatgactaaagctattacaacactatctgatctagtcaccgagggaaaatctaaagttgttcgtaaaaaagttaaaacttgtaagaagtaaatgcgtgcacttttttataaagatggtaaactctttaccgataataattttttaaatcctgtatcagacgataatccagcgtatgaggttttgcaacatgttaaaattcctactcatttaacagatgtagtagtatatgaacaaacgtgggaggaggcgttaactagattaatttttgtgggaagtgattcaaaaggacgtagacaatacttttacggaaaaatgcatgtacagaatcgcaacgctaaaagagatcgtatttttgttagagtatataacgttatgaaacgaattaattgttttataaacaaaaatataaagaaatcgtccacagattccaattatcagttggcggtttttatgttaatggaaactatgttttttattagatttggtaaaatgaaatatcttaaggagaatgaaacagtagggttattaacactaaaaaataaacacatagaaataagtcccgatgaaatagttatcaagtttgtaggaaaggacaaagtttcacatgaatttgttgttcataagtctaatagactatataaaccgctattgaaactgacggatgattctagtcccgaagaatttctgttcaacaaactaagtgaacgaaaggtatacgaatgtatcaaacagtttggtattagaatcaaggatctccgaacgtatggagtcaattatacgtttttatataatttttggacaaatgtaaagtccatatctcctcttccgtcaccaaaaaagttaatagcattaactatcaaacaaactgctgaagtggtaggtcatactccatcaatttcaaaaagagcttatatggcaacgactattttagaaatggtaaaggataaaaattttttagatgtagtatctaaaactacgttcgatgaattcctatctatagtcgtagatcacgttaaatcatctacggatggatgatatagatctttacacaaataattacaagaccgataaatggaaatggataagcgtatgaaatctctcgcaatgacagctttcttcggagagctaagcacattagatattatggcattgataatgtctatatttaaacgccatccaaacaataccattttttcagtggataaggatggtcagtttatgattgatttcgaatacgataattataaggcttctcaatatttggatctgaccctcactccgatatctggagatgaatgcaagactcacgcatcgagtatagccgaacaattggcgtgtgcggatattattaaagaggatattagcgaatatatcaaaactactccccgtcttaaacgatttataaaaaaataccgcaatagatcagatactcgtatcagtcgagatacagaaaagcttaaaatagctctagctaaaggcatagattacgaatatataaaagacgcttgttaataagtaaatgaaaaaaaactagtcgtttataataaaacacgatatggatgccaacgtagtatcattttctactattgcgacgtatatagacgctttagcgaagaatgcttcggaattagaacagaggtctaccgcatacgaaataaataatgaattggaactagtatttattaagccgccattgattactttgacaaatgtagtgaatatctctacgattcaggaatcgtttattcgatttaccgttactaataaggaaggtgttaaaattagaactaagattccattatctaaggtacatggtctagatgtaaaaaatgtacagttagtagatgctatagataacatagtttgggaaaagaaatcattagtgacggaaaatcgtcttcacaaagaatgcttgttgagactatcgacagaggaacgtcatatatttttggattacaagaaatatggatcctctatccgactagaattagtcaatcttattcaagcaaaaacaaaaaactttacgatagactttaagctaaaatattttctaggatccggtgcccagtctaaaagttctttgttgcacgctattaatcatccaaagtcaaggcctaatacatctctggaaatagaattcacacctagagacaatgaaacagttccatatgatgaactaataaaggaattgacgactctctcgcgtcatatatttatggcttctccagagaatgtaattctttctccgcctattaacgcgcctataaaaacctttatgttgcctaaacaagatatagtaggtttggatctggaaaatctatatgccgtaactaagactgacggcattcctataactatcagagttacatcaaacgggttgtattgttattttacacatcttggttatattattagatatcctgttaagagaataatagattccgaagtagtagtctttggtgaggcagttaaggataagaactggaccgtatatctcattaagctaatagagcctgtgaatgcaatcaatgatagactagaagaaagtaagtatgttgaatctaaactagtggatatttgtgatcggatagtattcaagtcaaagaaatacgaaggtccgtttactacaactagtgaagtcgtcgatatgttatctacatatttaccaaagcaaccagaaggtgttattctgttctattcaaagggacctaaatctaacattgattttaaaattaaaaaggaaaatactatagaccaaactgcaaatgtagtatttaggtacatgtccagtgaaccaattatctttggagaatcgtctatctttgtagagtataagaaatttagcaacgataaaggctttcctaaagaatatggttctggtaagattgtgttatataacggcgttaattatctaaataatatctattgtttggaatatattaatacacataatgaagtgggtattaagtccgtggttgtacctattaagtttatagcagaattcttagttaatggagaaatacttaaacctagaattgataaaaccatgaaatatattaactcagaagattattatggaaatcaacataatatcatagtcgaacatttaagagatcaaagcatcaaaataggagatatctttaacgaggataaactatcggatgtgggacatcaatacgccaataatgataaatttagattaaatccagaagttagttattttacgaataaacgaactagaggaccgttgggaattttatcaaactacgtcaagactcttcttatttctatgtattgttccaaaacatttttagacgattccaacaaacgaaaggtattggcgattgattttggaaacggtgctgacctggaaaaatacttttatggagagattgcgttattggtagcgacggatccggatgctgatgctatagctagaggaaatgaaagatacaacaaattaaactctggaattaaaaccaagtactacaaatttgactacattcaggaaactattcgatccgatacatttgtctctagtgtcagagaagtattctattttggaaagtttaatatcatcgactggcagtttgctatccattattcttttcatccgagacattatgctaccgtcatgaataacttatccgaactaactgcttctggaggcaaggtattaatcactaccatggacggagacaaattatcaaaattaacagataaaaagacttttataattcataagaatttacctagtagcgaaaactatatgtctgtagaaaaaatagctgatgatagaatagtggtatataatccatcaacaatgtctactccaatgactgaatacattatcaaaaagaacgatatagtcagagtgtttaacgaatacggatttgttcttgtagataacgttgatttcgctacaattatagaacgaagtaaaaagtttattaatggcgcatctacaatggaagatagaccgtctacaaaaaactttttcgaactaaatagaggagccattaaatgtgaaggtttagatgtcgaagacttacttagttactatgttgtttatgtcttttctaagcggtaaataataatatggtatgggttctgatctcccagttctaaatgcattaaataattccaatagagcgatttttgttcctataggaccttccaactgtggatactctgtattgttaatagatatattaatacttttgtcgggtaacagaggttctacgtcttctaaaaataaaagttttataacatctggcctgttcataaataaaaacttggcgattctatatatactcttattatcaaatctagccattgtcttatagatgtgagctactgtaggtgtaccatttgattttctttctaatactatatatttctctcgaagaagttcttgcacatcatctgggaataaaatactactgttgagtaaatcagttattttttttatatcgatattgatggacatttttatagttaaggataataagtatcccaaagtcgataacgacgataacgaagtatttatacttttaggaaatcacaatgactttatcagattaaaattaacaaaattaaaggagcatgtatttttttctgaatatattgtgactccagatacatatggatctttatgcgtcgaattaaatgggtctagttttcagcacggcggtagatatatagaggtggaggaatttatagatgctggaagacaagttagatggtgttctacatccaatcatatatctaaagatatacccgaagatatgcacactgataaatttgtcatttatgatatttatacgtttgattcgttcaagaataaacgattggtattcgtacaggtacctccgtcgttaggagatgatagtcatttgactaatccgttattgtcaccgtattatcgtaattcagtagccagacaaatggtcaatgatatgatttttaatcaagattcatttttaaaatatttattagaacatctgattagaagccactatagagtttctaaacatataacaatagttagatacaaggataccgaagaattaaatctaacgagaatatgttataatagagataagtttaaggcgtttgtattcgcttggtttaacggcgtttcggaaaatgaaaaggtactagatacgtataaaaaggtatctaatttgatataatgaattcagtgactgtatcacacgcgccatatactattacttatcacgatgattgggaaccagtaatgagtcaattggtagagttttataacgaagtagccagttggctgctacgagacgagacgtcgcctattcctgataagttctttatacagttgaaacaaccgcttagaaataaacgagtatgtgtgtgtggtatagatccgtatccgaaagatggaactggtgtaccgttcgaatcaccaaattttacaaaaaaatcaattaaggagatagcttcatctatatctagattaaccggagtaattgattataaaggttataaccttaatataatagacggggttataccctggaattattacttaagttgtaaattaggagaaacaaaaagtcacgcgatttactgggataagatttccaagttactgctgcagcatataactaaacacgttagtgttctttattgtttgggtaaaacagatttctcgaatatacgggccaagttagaatccccggtaactaccatagtcggatatcatccagcggctagagaccgccaattcgagaaagatagatcatttgaaattatcaacgttttactggaattagacaacaaggcacctataaattgggctcaagggtttatttattaatgctttagtgaaattttaacttgtgttctaaatggatgcggctattagaggtaatgatgttatctttgttcttaagactataggtgtcccgtcagcgtgcagacaaaatgaagatccaagatttgtagaagcatttaaatgcgacgagttagaaagatatattgagaataatccagaatgtacactattcgaaagtcttagggatgaggaagcatactctatagtcagaattttcatggatgtagatttagacgcgtgtctagacgaaatagattatttaacggccattcaagattttattatcgaggtgtcaaactgtgtagctagattcgcgtttacagaatgcggcgccattcatgaaaatgtaataaaatccatgagatctaatttttcattgactaagtctacaaatagagataaaacaagttttcatattatctttttagatacgtataccactatggatacattgatagctatgaaacgaacactattagaattaagtagatcatctgaaaatccactaaccagatcgatagacactgccgtatataggagaaaaacaactcttcgggttgtaggtactaggaaaaatccaaattgcgacactattcatgtaatgcaaccaccgcatgataatatagaagattacctattcacttacgtggatatgaacaacaatagttattacttttctctacaacaacgattggaggatttagttcctgataagttatgggaaccagggtttatttcattcgaagacgctataaaaagagtttcaaaaatattcattaattctataataaactttaatgatctcgatgaaaataattttacaacggtaccactggtcatagattacgtaacaccttgtgcattatgtaaaaaacgatcgcataaacatccgcatcaactatcgttggaaaatggtgctattagaatttacaaaactggtaatccacatagttgtaaagttaaaattgttccgttggatggtaataaactgtttaatattgcacaaagaattttagacactaactctgttttattaaccgaacgaggagaccatatagtttggattaataattcatggaaatttaacagcgaagaacccttgataacaaaactaattttgtcaataagacatcaactacctaaggaatattcaagcgaattactctgtccaagaaaacgaaagactgtagaagctaacatacgagacatgttagtagattcagtggagaccgatacctatccggataaacttccgtttaaaaatggtgtattggacctggtagacggaatgttttactctggagatgatgctaaaaaatatacgtgtactgtatcaaccggatttaaatttgacgatacaaagttcgtcgaagacagtccagaaatggaagagttaatgaatatcattaacgatatccaaccattaacggatgaaaataagaaaaatagagagctatatgaaaaaacattatctagttgtttatgcggtgctaccaaaggatgtttaacattcttttttggagaaactgcaactggaaagtcgacaaccaaacgtttgttaaagtctgctatcggtgacctgtttgttgagacgggtcaaacaattttaacagatgtattggataaaggacctaatccatttatcgctaacatgcatttgaaaagatctgtattctgtagcgaactacctgattttgcctgtagtggatcaaagaaaattagatctgacaatattaaaaagttgacagaaccttgtgtcattggaagaccgtgtttctccaataaaattaataatagaaaccatgcgacaatcattatcgatactaattacaaacctgtttttgataggatagataacgcattaatgagaagaattgccgtcgtgcgattcagaacacacttttctcaaccttctggtagagaggctgctgaaaataatgacgcgtacgataaagtcaaactattagacgaggggttagatggtaaaatacaaaataatatatatagatttgcatttctatacttgttggtgaaatggtacaaaaaatatcatgttcctattatgaaactatatcctacacccgaagagattcctgactttgcattctatctcaaaataggtactctgttggtatctagctctgtaaagcatattccattaatgacggacctctccaaaaagggatatatattgtacgataatgtggtcactcttccgttgactactttccaacagaaaatatccaagtattttaattctagactatttggacacgatatagagagcttcatcaatagacataagaaatttgccaatgttagtgatgaatatctgcaatatatattcatagaggatatttcatctccgtaaatatatgctcatatatttatagaagatatcacatatctaaatgaataccggaatcatagatttatttgataatcatgttgatagtataccaactatattacctcatcagttagctactctagattatctagttagaactatcatagatgagaacagaagcgtgttattgttccatattatgggatcaggtaaaacaataatcgctttgttgttcgccttggtagcttccagatttaaaaaggtttacattctagtgccgaacatcaacatcttaaaaattttcaattataatatgggtgtagctatgaacttgtttaatgacgaattcatagctgagaatatctttattcattccacaacaagtttttattctcttaattataacgataacgtcattaattataacggattatctcgctacaataactctatttttatcgttgatgaggcacataatatctttgggaataatactggagaacttatgaccgtgataaaaaataaaaacaagattccttttttactattgtctggatctcccattactaacacacctaatactctgggtcatattatagatttaatgtccgaagagacgatagattttggtgaaattattagtcgtggtaagaaagtaattcagacacttcttaacgaacgcggtgtgaatgtacttaaggatttgcttaaaggaagaatatcatattacgaaatgcctgataaagatctaccaacgataagatatcacggacgtaagtttctagatactagagtagtatattgtcacatgtctaaacttcaagagagagattatatgattactagacgacagctatgttatcatgaaatgtttgataaaaatatgtataacgtgtcaatggcagtattgggacaacttaatctgatgaataatttagatactttatttcaggaacaggataaggaattgtacccaaatctgaaaataaataatggcgtgttatacggagaagaattggtaacgttaaacattagttccaaatttaaatactttattaatcggatacagacactcaacggaaaacattttatatacttttctaattctacatatggcggattggtaattaaatatatcatgctcagtaatggatattctgaatataatggttctcagggaactaatccacatatgataaacggcaaaccaaaaacatttgctatcgttactagtaaaatgaaatcgtctttagaggatctattagatgtgtataattctcctgaaaacgatgatggtagtcaattgatgtttttgttttcatcaaacattatgtccgaatcctatactctaaaagaggtaaggcatatttggtttatgactatcccagatactttttctcaatacaaccaaattcttggacgatctattagaaaattctcttacgccgatatttctgaaccagttaatgtatatcttttagccgccgtatattccgatttcaatgacgaagtgacgtcattaaacgattacacacaggatgaattaattaatgttttaccatttgacatcaaaaagctgttgtatctaaaatttaagacgaaagaaacgaatagaatatactctattcttcaagagatgtctgaaacgtattctcttccaccacatccatcaattgtaaaagttttattgggagaattggtcagacaatttttttataataattctcgtattaagtataacgataccaagttacttaaaatggttacatcagttataaaaaataaagaagacgctaggaattacatagatgatattgtaaacggtcacttctttgtatcgaataaagtatttgataaatctcttttatacaaatacgaaaacgatattattacagtaccgtttagactttcctacgaaccatttgtttggggagttaactttcgtaaagaatataacgtggtatcttctccataaaactgatgagatatataaagaaataaatgtcgagctttgttaccaatggatacctttccgttacattggaaccacacgagctgacgttagacataaaaactaatattaggaatgccgtatataagacgtatctccatagagaaattagtggtaaaatggccaagaaaatagaaattcgtgaagacgtggaattacctctcggcgaaatagttaataattctgtagttataaacgttccgtgtgtaataacctacgcgtattatcacgttggggatatagtcagaggaacattaaacatcgaagatgaatcaaatgtaactattcaatgtggagatttaatctgtaaactaagtagagattcgggtactgtatcatttagcgattcaaagtactgcttttttcgaaatggtaatgcgtatgacaatggcagcgaagtcactgccgttctaatggaggctcaacaaggtatcgaatctagttttgtttttctcgcgaatatcgtcgactcataaaaaagagaatagcggtaagtataaacacgaatactatggcaataattgcgaatgttttattctcttcgatatatttttgataatatgaaaaacatgtctctctcaaatcggacaaccatctcataaaatagttctcgcgcgctggagaggtagttgccgctcgtataatctctccagaataatatacttgcgtgtcgtcgttcaatttatacggatttctatagttctctgttatataatgcggtttgccctcatgattagacgacgacaatagtgttctaaatttagatagttgatcagaatgaatgtttattggcgttggaaaaattatccatacagcgtctgcagagtggttgatagttgttcctagatatgtaaaataatccaacttactaggcagcaaattgtctagataaaatactgaatcaaacggtgcagacgtattggcggatctaatggaatccaattgattaactatcttttgaaaatatacatttttatgatccaatacttgtaagaatatagaaataatgataagtccatcatcgtgtttttttgcctcttcataagaactatattttttcttattccaatgaacaagattaatctctccagagtatttgtacacatctatcaagtgattggatccataatcgtcttcctttccccaatatatatgtagtgatgataacacatattcattggggagaaaccctccacttatatatcctcctttaaaattaatccttactagttttccagtgttctggatagtggttggtttcgactcattataatgtatgtctaacggcttcaatcgcgcgttagaaattgcttttttagtttctatattaataggagatagttgttgcggcatagtaaaaatgaaatgataactgtttaaaaatagctcttagtatgggaattacaatggatgaggaagtgatatttgaaactcctagagaattaatatctattaaacgaataaaagatattccaagatcaaaagacacgcatgtgtttgctgcgtgtataacaagtgacggatatccgttaataggagctagaagaacttcattcgcgttccaggcgatattatctcaacaaaattcagattctatctttagagtatccactaaactattacggtttatgtactacaatgaactaagagaaatctttagacggttgagaaaaggttctatcaacaatatcgatcctcactttgaagagttaatattattgggtggtaaactagataaaaaggaatctattaaagattgtttaagaagagaattaaaagaggaaagtgatgaacgtataacagtaaaagaatttggaaatgtaattctaaaacttacaacacgggataaattatttaataaagtatatataagttattgcatggcgtgttttattaatcaatcgttggaggatttatcgcatactagtatttacaatgtagaaattagaaagattaaatcattaaatgattgtattaacgacgataaatacgaatatctgtcttatatttataatatgctagttaatagtaaatgaacttttacagatctagtataattagtcagattattaagtataatagacgactagctaagtctattatttgcgaggatgactctcaaattattacactcacggcattcgttaaccaatgcctatggtgtcataaacgagtatccgtgtccgctattttattaactactgataacaaaatattagtatgtaacagacgagatagttttctctattctgaaataattagaactagaaacatgtttagaaagaaacgattatttctgaattattccaattatttgaacaaacaggaaagaagtatactatcgtcatttttttctctagatccagctactactgataatgatagaatagacgctatttatccgggtggcatacccaaaaggggtgagaatgttccagagtgtttatccagggaaattaaagaagaagttaatatagacaattcttttgtattcatagacactcggttttttattcatggcatcatagaagataccattattaataaattttttgaggtaatcttctttgtcggaagaatatctctaacgagtgatcaaatcattgatacatttaaaagtaatcatgaaatcaaggatctaatatttttagatccgaattcaggtaatggactccaatacgaaattgcaaaatatgctctagatactgcaaaacttaaatgttacggccatagaggatgttattatgaatcattaaaaaaattaactgaggatgattgattaaaaaatataaattaatttaccatcgtgtatttttataacgggattgtccggcatatcatgtagatagttaccgtctacatcgtatactcgaccatctacgcctttaaatcctctatttattgacattaatctattagaattggaataccaaatattagtaccctcaattagtttattggtaatattttttttagacgatagatcgatggctcttgaaaccaaggttttccaaccggactcattgtcgatcggtgagaagtctttttcattagcatgaatccattctaatgatgtatgtttaaacactctaaacaattggacaaattcttttgatttgctttgaatgatttcaaataggtcttcgtctacagtaggcataccattagataatctagccattataaagtgcacgtttacatatctacgttctggaggagtaagaacgtgactattgagacgaatggctcttcctactatctgacgaagagacgcctcgttccatgtcatatctaaaatgaagatatcattaattgagaaaaaactaataccctcgcctccactagaagagaatacgcatgttttaatgcattctccgttagtgtttgattcttggttaaactcagccaccgccttgattctagtatcttttgttctagatgagaactctatattagagataccaaagactttgaaatatagtaataagatttctattcctgactgattaacaaatggttcaaagactagacatttaccatgggatgctaatattcccaaacatacatctataaatttgacgcttttctcttttaattcagtaaatagagagatatcagccgcactagcatcccctttcaatagttctccctttttaaaggtatctaatgcggatttagaaaactctctatctcttaatgaatttttaaaatcattatatagtgttgctatctcttgcgcgtattcgcccggatcacgattttgtctttcaggaaagctatcgaacgtaaacgtagtagccatacgtctcagaattctaaatgatgatatacctgtttttatttcagcgagtttagccttttgataaatttcttcttgctttttcgacatattaacgtatcgcattaatactgttttcttagcgaatgatgcagacccttctacgtcatcaaaaatagaaaactcgttattaactatatacgaacatagtcctcctagtttggagactaattctttttcatcgactagacgtttattctcaaatagcgattggtgttgtaaggatcctggtcgtagtaagttaaccaacatggtgaattcttgcacactattgacgataggtgtagccgataaacaaatcatcttatggttttttaacgcaatggtcttagataaaaaattatatactgaacgagtaggacggatcttaccatcttctttgattaatgatttagaaatgaagttatgacattcatcaataatgacgcatattctactcttggaattaatagttttgatattagtaaaaaatttatttctaaaattttgatcatcgtaattaataaaaatacaatccttcgttatctctggagcgtatctgagtatagtgttcatccaaggatcttctatcaaagcctttttcaccaataagataatagcccaattcgtataaatatccttaagatgtttgagaatatatacagtagtcattgttttaccgacacccgtttcatggaacaataaaagagaatgcatactgtctaatcctaagaaaactcttgctacaaaatgttgataatccttgaggcgtactacgtccgaccccatcatttcaacgggcatattagtagttctgcgtaaggcataatcgatataggccgcgtgtgatttactcatttatgagtgataagtaataactatgttttaaaaatcacagcagtagtttaactagtcttctctgatgtttgttttcgatactttttgaatcagaagtcatactagaataaagcaacgagtgaacgtaatagagagcttcgtatactctattcgaaaactctaagaacttattaatgaattccgtatccactggattgtttaaaatactaaattgaacactgttcacatccttccaagaagaagacttagtgacggacttaacatgagacataaataaatccaaattttttttacaaacatcactagccaccataatggcgctatctttcaaccagctatcgcttacgcattttagcagtctaacatttttaaagagactacaatatattctcatagtatcgattacacctctaccgaataaagttggaagtttaataatacaatatttttcgtttacaaaatcaaataatggtcgaaacacgtcgaaggttaacatcttataatcgctaatgtatagattgttttcagtgagatgattattagatttaatagcatctcgttcacgtttgaacagtttattgcgtgcgctgaggtcggcaactacggcgtccgctttagtactcctcccataatactttacgctattaatctttaaaatttcatagactttatctagatcgctttctggtaacatgatatcatgtgtaaaaagttttaacatgtcggtcggcattctatttagatcattaactctagaaatctgaagaaagtaattagctccgtattccagactaggtaatgggcttttacctagagacagattaagttctggcaatgtttcataaaatggaagaaggacatgcgttccctcccggatattttttacaatttcatccatttacaactctatagtttgttttcattattattagttattatctcccataatcttggtaatacttaccccttgatcgtaagataccttatacaggtcattacatacaactaccaattgtttttgtacataatagattggatggttgacatccatggtggaataaactactcgaacagatagtttatctttccccctagatacattagccgtaatagttgtcggcctaaagaatatctttggtgtaaagttaaaagttagggttcttgttccattattgctttttgtcagtagttcattataaattctcgagatgggtccgttctctgaatatagaacatcatttccaaatctaacttctagtctagaaataatatcggtcttattcttaaaatctattcccttgatgaagggatcgttaatgaacaaatccttggcctttgattcggctgatctattatctccgttatagacgttacgttgactagtccaaagacttacaggaatagatgtatcgatgatgttgatactatgtgatatgtgagcaaagattgttctcttagtggcatcactatatgttccagtaatggcggaaaactttttagaaatgttatatataaaagaattttttcgtgttccaaacattagcagattagtatgaagataaacactcatattatcaggaacattatcaatttttacatacacatcagcatcttgaatagaaacgataccatcttctggaacctctacgatctcggcagactccggataaccagtcggtgggccatcgctaacaataactagatcatccaacaatctactcacatatgcatctatataatctttttcatcttgtgagtaccctggatacgaaataaatttattatccgtatttccataataaggtttagtataaacagagagagatgttgccgcatgaacttcagttacagtcgccgttggttggtttatttgacctattactctcctaggtttctctataaacgatggtttaatttgtacattcttaaccatatatccaataaagctcaattcaggaacataaacaaattctttgttgaacgtttcaaagtcgaacgaagagtcacgaataacgatatcggatactggattgaaggttaccgttacggtaatttttgaatcggatagtttaagactgctgaatgtatcttccacatcaaacggagttttaatataaacgtatactgtagatggttctttaatagtgtcattaggagttaggccaatagaaatatcattaagttcactagaatatccagagtgtttcaaagcaattgtattattgatacaattattatataattcttcgccctcaatttcccaaataacaccgttacacgaagagatagatacgtgattaatacatttatatccaacatatggtacgtaactgaatcttcccatacctttaacttctggaagttccaaactcagaaccaaatgattaagcgcagtaatatactgatccctaatttcgaagctagcgatagcctgattgtctggaccatcgtttgtcataactccggatagagaaatatattgcggcatatacaaagttggaatttgactatcgactgcgaagacattagaccgtttaatagagtcatccccaccgatcaaagaattaatgatagtattattcattttctatttaaaatggaaaaagcttacaataaactccgtagagaaatatctataatttgtgagttttccttaaagtaacagcttccgtaaacgccgtctttatctcttagtaggtttattgtatttatgaccttttccttatcttcatagaatactaaaggcaacaaagaaatttttggttcttctctaagagctacgtgagacttaaccatagaagccaacgaatccctacatattttagaacagaaataccctacttcaccacccttgtatgtctcaatactaataggtctaaaaaccaaatcttgattacaaaaccaacacttatcaattacactatttgtcttaatagacacatctgccatagatttataatactttggtagtatacaagcgagtgcttcttctttagcgggcttaaagactgctttaggtgctgaaataaccacatctggaaggcttactcgcttagccatttaattacggaactatttttttatacttctaatgagcaagtagaaaacctctcatctacaaaaacgtactcgtgtccataatcctctaccatagttacacgttttttagatctcatatgtgctaaaaagttttcccatactaattggttactattatttttcgtataatttttaacagtttgaggttttagatttttagttacagaagtgatatcgaatattttatccaaaaagaatgaataattaattgtcttagaaggagtgttttcttggcaaaagaataccaagtgcttaaatatttctactacttcattaatcttttctgtactcagattcagtttctcatcttttacttgattgattatttcaaagactaacttataatcctttttatttattctctcgttagccttaagaaaactagatacaaaatttgcatctacatcatccgtggatatttgatttttttccatgatatccaagagttccgagataatttctccagaacattgatgagacaataatctccgcaatacatttctcaaatgaataagtttattagacacgtggaagtttgactttttttgtacctttgtacatttttgaaataccgactcgcaaaaaatacaatattcatatccttgttcagatactataccgttatgtctacaaccgctacataatcgtagattcatgttaacactctacgtatctcgtcgtccaatattttatataaaaacattttatttctagacgttgccagaaaatcctgtaatatttttagttttttgggctgtgaataaagtatcgccctaatattgttaccgtcttccgccaatatagtagttaaattatccgcacatgcagaagaacaccgcttaggcggattcagtacaatgttatatttttcgtaccaactcatttaaatatcataatctaaaatagttctgtaatatgtctagcgctaatatattgatcataatcctgtgcataaattaagatacaacaatgtctcgaaatcatcgacatggcttcttccatagttagaagatcgtcgtcaaagttagcaacgtgattcatcaacatttgctgttttgaggcagcaaatactgaaccgtcgccattcaaccattcataaaaaccatcgtctgaatccattgataatttcttgtactggtttttgagagctcgcatcaatctagcatttctagctcccggattgaaaacagaaagaggatcgtacatccagggtccattttctgtaaatagaatcgtataatgtcccttcaagaagatatcagacgatccacaatcaaagaattggtctccgagtttgtaacaaactgcggactttaacctatacatgataccgtttagcataatttctggtgatacgtcaatcggagtatcatctattagagatctaaagccggtgtaacattctccaccaaacatattcttattctgacgtcgttctacataaaacatcattgctccattaacgataacaggggaatgaacagcactacccatcacattagttcccaatggatcaatgtgtgtaactccagaacatcttccatagcctatgttaggaggagcgaacaccactcttccactattgccatcgaatgccatagaataaatatccttggaattgatagaaatcggactgtcggatgttgtgatcatcttcataggattaacaactatgtatggtgccgcctgaagtttcatatcgtaactgatgccgtttataggtctagccacagaaaccaacgtaggtctaaatccaactatagacaaaatagaagccaatatctgttcctcatctgtcataacttgagagcatccagtatgaataatcttcattagatggggatctaccgcatcatcatcgttacaataaaaaattcccattctaatgttcataattgcttttctaatcatggtatgcatgtttgctctctgaatctctgtggaaattagatctgatacacctgtaatcactatcggattatcctccgtaagacgattaaccaacaacatataattataagactttacttttctaaattcataaagttgctggattaggctataggtgtctccatgtacatacgcgttctcgagcgcaggaagtttaataccgaatagtgccatcagaataggatgaatatagtaattagtttctggttttctataaataaaagacaaatcttgtgaactagacatatcggtaaaatgcatggattggaatcgtgtagtcgacagaagaatatgatgattagatggagagtatattttatctaactctttgagttggtcaccgattctaggactagctcgagaatgaataagtactaaaggatgagtacatttcacagaaacactagcattgttcaatgtgctctttacatgggtaaggagttgaaatagctcgtttctatttgttctgacaatatttagtttattcataatgttaagcatatcctgaatagtaaagttagatgtgtcatacttgttagtagttagatatttagcaattgcattcccatcatttctcaatctcgtactccaatcatgcgtggatgctacttcgtcgatggaaaccatacaatcctttttgataggctgttgagattgatcatttcctgcacgtttaggtttggtacgttgatttctagcccctgcggatataaagtcatcgtctacaatttgggacaatgaattgcatacactacaagacaaagatttatcagaagtgtgaatatgatcttcatctaccaaagaaagagtttgattagtataactagattttagtcctgcgttagatgttaaaaaaacatcgctattgaccacggcttccattatttatattcgtagtttttactcgaaagcgtgattttaatatccaatcttattacttttggaatcgttcaaaacctttgactagttgtagaatttgatctattgccctacgcgtatactcccttgcatcatatacgttcgtcaccagatcgtttgtttcggcctgaagttggtgcatatctctttcaacattcgacatgagatccttaagggccatatcgtctagattttgttgagatgctgctcctggatttggattttgttgtgctgttgtacatactgtaccaccagtaggtgtaggagtacatacagtggccacaataggaggttgagaaagtgtaaccgttggagtagtacaagaaatacttccatccgattgttgtgtacatgtagttgttggtaacgtctgagaaggttgggtagatggcggcgtcgtcgttttttgatctttattaaatttagagataatatcctgaacagcattgctcggcgtcaacgctggaaggagtgaactcgccggcgcatcagtatcttcagacagccaatcaaaaagattagacatatcagatgatgtattagtttgttgtcgtggttttggtgtaggagcagtactactaggtagaagaataggagccgatgtagctgttggaaccggctgtggagttatatgaatagttggttgtagcggttggataggctgtctgctggcggccatcatattatctctagctagttgttctcgcaactgtctttgataatacgactcttgagactttagtcctatttcaatcgcttcatcctttttcgtatccggatccttttcttcagaataatagattgacgactttggtgtagaggattctgccagcctctgtgagaacttgttaaagaagtccatttaaggctttaaaattgaattgcgattataagattaaatggcagacacagacgatattatcgactatgaatccgatgatctcaccgaatacgaggatgatgaagaagaggaagaagatggagagtcactagaaactagtgatatagatcccaaatcttcttataagattgtagaatcagcatccactcatatagaagatgcgcattccaatcttaaacatatagggaatcatatatctgctcttaaacgacgctatactagacgtataagtctatttgaaatagcgggtataatagcagaaagctataacttgcttcaacgaggaagattacctctagtttcagaattttctgacgaaacgatgaagcaaaatatgctacatgtaattatacaagagatagaggagggttcttgtcctatagtcatcgaaaagaacggagaattgttgtcggtaaacgattttgacaaagatggtctaaaattccatctagactatattatcaaaatttggaaacttcaaaaacgatattagaatttatacgaatatcgttctctaaatgtcacaatcaagtctcgcatgttcagcaatttattgtcgtactttatatcgtgttcattaacgatatcttgcaaaatagtaatgattctatcttccttcgatagatattcttcagagattattgtcttatattctttcttgttatcagatatgaatttgataagactttgaacattattgatacccgtctgtttaattttttctacagatattttagttttggcagattctatcgtatctgtcaatagacatccaacatcgacattcgacgtcaattgtctataaatcaacgtataaattttagaaataacattagcgaattgttgtgcgttgatgtcgttattctgaaacagtatgattttaggtagcattttcttaacaaagagaacgtatttattgttactcagttgaacagatgatatatccagattactaacgcatctgattccgtataccaaactttcagaagaaatggtatacaattgtttgtattcattcaatgtctctttttcagaaattagtttagagtcgaatactgcaataattttcaagagatagttttcatcagataagattttatttagtgtagatatgataaaactattgttttgttggagaacttgatacgccgcgttctctgtagtcgacgctctcaaatgggaaacaatctccattatttttttggaatcggatactatatcttcggtatcttgacgcagtctagtatacatagagttaagagagattagagtttgtacattaagcaacatgtctctaaatgtggctacaaacttttcctttttcacatcatctagtttattatataccgatttcacaacggcaccagatttaaggaaccagaatgaaaaactctgataactacaatatttcatcatagttacgattttatcatcttctatagttggtgtaatagcgcatacctttttctccaagactggaaccaacgtcataaaaatgtttaaatcaaaatccatatcaacatctgatgcgctaagaccagtctcgcgttcaagattatctttactaatggtgacgaactcatcgtataaaactctaagtttgtccattatttatttacagatttagttgtttaatttatttgtgctcttccagagttgggatagtatttttctaacgtcggtattatattattaggatctacgttcatatgtatcataatattaatcatccacgttttgataaatctatctttagcttctgaaataacgtatttaaacaaaggagaaaaatatttagctacggcatcagacgcaataacattttttgtaaatgtaacgtatttagacgacagatcttcgttaaaaagttttccatctatgtagaatccatcggttgttaacaccattcccgcgtcagattgaataggagtttgaatagtttgttttggaaatagatccttcaataacttatagttgggtgggaaaaaatcgattttatcactagactctttcttttttactatcattacctcatgaactatttcttgaatgagtatatgtattttctttcctatatcggacgcgttcattggaaaatataccatgtcgttaactataagaatatttttatcctcgtttacaaactgaataatatcagatgtagttcgtaaacgaactatatcatcaccagcacaacatctaactatatgatatccactagtttcctttagccgtttattatcttgttccatattagcagtcattccatcatttaagaaggcgtcaaaaataatagggagaaatgacattttggattctgttacaactttaccaaaattaaggatatacggacttactatctttttctcaacgtcaatttgatgaacacacgatgaaaatgtgcttctatgagattgatcatgtagaaaacaacaagggatacaatatttccgcatatcatgaaatatattaagaaatcccaccttattatatttccccaaaggatccatgcacgtaaacattatgccgttatcattaataaagacttctttctcatcggatctgtaaaagttgttactgatttttttcattccaggatctagataattaataatgatgggttttctattcttattctttgtattttggcatatcctagaccagtaaacagtttccactttggtaaaatcagcagacttttgaacgctattaaacatggcattaatggcaataactaaaaatgtaaaatatttttctatgttaggaatatggtttttcactttaatagatatatggtttttggccaaaatgatagatatttttttatccgaggatagtaaaatattattagtcgccgtctctataaaaatgaagctagtctcgatatccaattttattctagaattgataggagtcgccaaatgtaccttatacgttatatctcccttgatgcgttccatttgtgtatctatatcggacacaagatctgtaaatagttttacgttattaatcatcacggtatcgccgtcgctagataacgctaatgtaccatccaagtcccaaatggagagatttaactgttcatcgtttagaataaaatgattaccggtcatattaataaagtgttcatcgtatctagataacaacgacttataattaatgtccaagtcttgaactcgctgaatgatcttttttaacccagttagttttagattggtacgaaatatattgttaaactttgattctacagtaatgtccaaatctagttgtggaaatacttccatcaacattgtttcaaacttgataatattattatctacatcttcgtacgatccaaattccggaatagatgtatcgcacgctctggccacccagataaccaaaaagtcacacgctccaggatatacattgtataaaaagctatcgttttttagtagggtttttttctgcgtgtatacgaagggattaaaaatagtattatcaacgtaactatattccaaattattcttatgagaatagataataatatcgtccttaatatctaacaaatttcctaaatatccctttaattgagtcattcgaagcgtcaatagaatatgtctcttaactatttccggctgttgtatatttaaatgacttcgtaaaaaataatatatgggcgacttctcatctatgtaatcatatggagtgagatatagggctcgttctacctcctgccccttacccacctgtaataccaattgcggacttactatatatcgcatatttatatcgtggggtaaagtgaaaatctactaccgatgatgtaagtcttacaatgttcgaaccagtaccagatcttaatttggaggcctccgtagaactaggggaggtaaatatagatcaaacaacacctatgataaaggagaatagcggttttatatcccgcagtagacgtctattcgcccatagatctaaggatgatgagagaaaactagcactacgattctttttacaaagactttattttttagatcatagagagattcattatttgttcagatgcgttgacgctgtaaaagacgtcactattaccaaaaaaaataacattatcgtggcgccttatatagcacttttaactatcgcatcaaaaggatgcaaacttacagaaacaatgattgaagcattctttccagaactatataatgaacatagtaagaaatttaaattcaactctcaagtatccatcatccaagaaaaactcggataccagtttggaaactatcacgtttatgattttgaaccgtattactctacagtagctctggctattcgagatgaacattcatctggcatttttaatatccgtcaagagagttatctggtaagttcattatctgaaataacatatagattttatctaattaatctaaaatctgatcttgttcaatggagtgctagtacgggcgctgtaattaatcaaatggtaaatactgtattgattacagtgtatgaaaagttacaactggtcatagaaaatgattcacaatttacatgttcattggctgtggaatcaaaacttccaataaaattacttaaagatagaaatgaattatttacaaaattcattaacgagttaaaaaagaccagttcattcaagataagcaaacgcgataaggatacgctactaaaatattttacttaggactggagttagaatttatagacgactcatttcgtttatcattgttactattattactattactatcattattagtgttggcattattagtattcttcttgtcatcttgttcagaaatatacagcaatgctatacctaatactaaatacattatcatgctcgcaatggctctaacaacaacgaaccaaaatgaatttggtcgtagcttttgttcacaaaaatacataaagaaatgtctacataaatctatggcgccattggctacttgaaatagcgccagtcctcctacagattttaatatagctgtataacatgacatttattcatcatcaaaagagacagagtcaccatctgtcatatttagattttttttcatgtgttcaaagtatcctctactcatttcattataatagtttatcatacttagaattttaggacggatcaatgagtaagacttgactagatcgtcagtagtaatttgtgcatcgtctattctgcatccgcttcgtcgaataatgtatagcatcgctttgagattctccatagctatcaagtctttatacaatgacatggaaatatctgtgaatactttatacttctccaacatcgatgccttaacatcatcgcctactttagcattgaaaatacgttctattgtgtagatggatgtagcaagatttttaaacaacaatgccatcttacacgatgattgcctcaagtctccaatcgtttgtttagaacgattagctacagagtccaatgcttggctgactagcatattattatctttagaaattgtattcttcaatgaggcgtttatcatatctgtgatttcgttagtcatattacagtctgactgggttgtaatgttatccaacatatcacctatggatacggtacacgtaccagcatttgtaataatcctatctaagatgttgtatggcattgcgcagaaaatatcttctcctgtaatatctccactctcgataaatctactcagattattcttaaatgccttattctctggagaaaagatatcagtgtccatcatttcattaatagtatacgcagaaaagataccacgagtatcaattctatccaagatacttatcggttccgagtcacagataatggtttcctctccttcgggagatcctgcatagaaatatctaggacaatagtttctatactgtctgtaactctgataatctctaaagtcactaactgataccatgaaattgagaagatcaaacgctgaagtaattaatttttctgcctcgtttttactacaactagttttcatcaatgtagtgacgatgtattgtttagttacttttggtctaatactgatgatagagatattattgcttcccataatggatcttctagtagtcaccttaaagcccattgatgcgaatagcagatagataaagtcttggtatgactcctttctaatatagtacggactacctttgtcacccaactttatacccacataagccataacaacctctttaatagccgtttcatgaggtttatcagccatgagcctgagtagttggaagaatctcatgaatcccgtctcagaaagtcctatatgcatgatagatttatctttcctgggaaactctcgtatagtcatagatgaaatactctttaaagtttctgaaataagattagtaacagtcttacctccgactactctaggtaacaaacaaactctaataggtgttttctctgcggagataatatcagaaaggatagagcaataagtagtattattgtgattataaagaccgaatacataacaggtagaatttataaacatcatgtcctgaaggtttttagacttgtattcctcgtaatccataccgtcccaaaacatggatttggtaactttgatagccgtagatctttgttccttcgccaacaggttaaagaaattaataaagaatttgttgtttctatttatgtccacaaattgcacgtttggaagcgccacggttacattcactgcagcattttgaggatcgcgagtatgaagtacgatgttattgtttactggtatatctggaaagaaatctaccagtctaggaataagagattgatatcgcatagaaatagtaaagtttataatctcatcatcgaagagcattttgttaccattgtaataaatatccactctgtcatatgtataaatgaagtactgttcaaacatgatgagatgtttatatgttggcatagtagtgagatcgacgtttggtaatggcaatgtattaagattaactccataatgtctagcagcatctgcgatgttataagcgtcgtcaaagcggggtcgatcttgtattgttatatattgtctaacacctataagattatcaaaatcttgtctgcttaatacaccgttaacaatttttgccttgaattcttttattggtgcattaataacatccttatagaggatgttaaacaaataagtgttatcaaagttaagatctggatatttcttttctgctagaacatccattgagtcggagccatctggtttaatataaccaccgataaatctagctctgtattctgtatccgtcaatctaatattaagaaggtgttgagtgaaaggtggaagatcgtaaaagctgtgagtattaatgataggattagtttccgaactaatgttaattggggtattaataatatctatatttccagcgttaagtgtaacattaaacagttttaattcacgtgacgtggtatcaattaaataattaatgcccaatttggatatagcagcctgaagctcatcttgtttagttacggatcctaatgagttattaagcaatatatcgaacggatgaacgaaggttgttttaagttggtcacatactttgtaatctagacatagatgcggaagaacggtagaaactatacgaaataaatattcagagtcctctaattgatcaagagtaactattgacttaataggcatcatttatttagtattaaatgacgaccgtaccagtgacggatatacaaaacgatttaattacagagttttcagaagataattatccatctaacaaaaattatgaaataactcttcgtcaaatgtctattctaactcacgttaacaacgtggtagatagagaacataatgccgccgtagtgtcatctccagaggaaatatcctcacaacttaatgaagatctatttccagatgatgattcaccggccactattatcgaacgagtacaacctcatactactattattgacgatactccacctcctacgtttcgtagagagttattaatatcggaacaacgtcaacaacgagaaaaaagatttaatattacagtatcgaaaaatgctgaagcaataatggaatctagatctatgataacttctatgccaacacaaacaccatccttgggagtagtttatgataaagataaaagaattcagatgttagaggatgaagtggttaatcttagaaatcaacgatctaatacaaaatcatctgataatttagataattttaccaaaatactatttggtaagactccgtacaaatcaacagaagttaataagcgtatagccatcgttaattatgcaaatttgaacgggtcccccttatcagtcgaggacttggatgtttgttcggaggatgaaatagatagaatctataaaacgattaaacaatatcacgaaagtagaaaacgaaaaattatcgtcactaacgtgattattattgtcataaacattatcgagcaggcattgctaaaactcggatttgaagaaatcaaaggactgagtaccgatatcacttcagaaattatcgatgtggagatcggagatgactgcgatgctgtagcatctaaactaggaatcggtaacagtccggttcttaatattgtattgtttatactcaagatattcgttaaacgaattaaaattatttaatttaatacattcccatatccagacaacaatcgtctggattaatctgttcctgtcgtctcataccggacgacatattaatctttttattagtgggcatctttttagatggtttctttttcccagcattaactgagtcgatacctagaagatcgtgattgatctctccgaccattccacgaacttctaattggccgtctctgacggtaccataaactattttaccagcattagtaacagcttggacaatctgaccatccatcgcattgtacgatgtagtagtaactgttgttctacgtctaggagcaccagaagtatttttggagcccttggatgttgatgtagaagaagacgaggattttgattttggtttacatgtaatacattttgaactctttgattttgtatcacatgcgccggcagtcacatctgtttgagaattaagattattgttgcctcctttgacggctgcatctccaccgatttgcgctagtagatttttaagctgtggtgtaatcttattaactgtttcgatataatcatcgtaactgcttctaacggctaaattttttttatccgccatttagaagctaaaaatatttttatttatgcagaagatttaactagattatacaatgaactaatatgatccttttccagattatttacaaacttggtattttttggttctggaggaggcgaatttaaattcggacttggattcggattttgtaagttcttgatcttattatacatcgagtataggatggcgacagtaactgctacacaaataccgatcaaaagaagaataccaatcatttattgacaataacttcactattgatcaagtatgcaatatatcatcttttcactaaataagtagtaataatgattcaacaatgtcgagatatatggacgataataatttagttcatggaaatatcgctatgattggtgtgaatgactccgctaactctgtggggtgcgcagtgctttccccacatagaataaattagcattccgactgtgataataataccaagtataaacgccataatactcaatactttccatgtacgagtgggactggtagacttactaaagtcaataaaggcgaagatacacgaaagaatcaaaagaatgattccagcgattagcacgccggaaaaataatttccaatcataagcatcatgtccatttaactaataaaaattttaaatcgccgaatgaacaaagtggaatataaaccatataaaaacaatagtttgtactgcaaaaataatatctatttttgttttcgaagatatggtaaaattaaatagtagtacacagcatgttataactaacagcagcaacggctcgtaattacttatcatttactagacgaaaaggtggtgggatattttcttgctcaaataatacgaatatatcacccatccattttatgcgatgtttatatactctaatctttaatagatctatagacgacgggtttaccaacaatatagattttatcgattcatctaatttaaacccttccttaaacgtgaatgatctattatctggcataacgatgaccctacctgatgaatcggacaatgtactgggccatgtagaataaattatcaacgaattatcgtctacgaacatttatatcatttgttttaattttaggacgcgaataaatggatataaaatagaaaataacagatattacaaccagtgttatggccgcgcccaaccaggtaggcagttttattttatcttttactacaggttctcctggatgtacgtcaccaacggcggacgtagttctagtacaattagacgtaagttccgcttgggaattttttaacgctaaagagttaacgttaatcgtgcacccaacgtatttacatctagttcgttgaacatcttgattataatataaccattttctatctctagattcgtcagtgcactcatgtaaccaacataccctaggtcctaaatatttatctccggaattagattttggataattcgcgcaccaacaatttctatttcctttatgatcgttacaaaagacgtataatgccgtatccccaaaagtaaaataatcaggacgaataattctaataaactcagaacaatatctcgcatccatatgtttggagcaaatatcggaataagtagacatagccggtttccgttttgcacgtaaccattctaaacaattggggtttccaggatcgtttctacaaaatccagtcatgaaatcgtcacaatgttctgtcttgtaattattattaaatatttttggacagtgtttggtatttgtcttagaacaacattttgccacgctatcactatcgcccaggagataatccttttttataaaatgacatcgttgcccggatgctatataatcagtagcgtgttttaaatccttaatatattcaggagttacctcgttctgataatagattaatgatccaggacgaaatttgaaagaactacatggttctccatgaattaatacatattgtttagcaaattcaggaactataaaactactacaatgatctatcgacataccatctatcaaacaaaacttgggtttaatttctcccggagatgtttcataatagtacgtataactttcttctgcaaacttaacagctctattatattcaggataattaaaacctaattccatatatttgtctcgtatatctgctattcctggtgctattttgattctattaagagtaacagctgcccccattcttaataatcgtcagtatttaaactgttaaatgttggtatatcaacatctaccttatttcccgcagtataaggtttgttgcaggtatactgttcaggaatggttacatttatacttcttctatagtcctgtctttcgatgttcatcacatatgcaaagaacagaataaacaaaataatgtaagaaataatattaaatatctgtgaattcgtaaatacattgattgccataataattacagcagctacaatacacacaatagacattcccacagtgttgccattacctccacgatacatttgagttactaagcaataggtaataactaagctagtaagaggcaatagaaaagatgagataaatatcatcaatatagagattagaggagggctatatagagccaagacgaacaaaatcaaaccgagtaacgttctaacatcattatttttgaagattcccaaataatcattcattcctccataatcgttttgcatcatacctccatctttaggcataaacgattgctgctgttcctctgtaaataaatctttatcaagcactccagcacccgcagagaagtcgtcaagcatattgtaatatcttaaataactcatttatatattaaaaaatgtcactattaaagatggagtataatctttatgccgaactaaaaaaaatgacttgtggtcaacccctaagtctttttaacgaagacggggatttcgtagaagttgaaccgggatcatcctttaagtttctgatacctaagggattttacgcctctccttccgtaaagacgagtctagtattcgagacattaacaacgaccgataataaaatcactagtatcaatccaacaaatgcgccaaagttatatcctcttcaacgcaaagtcgtatctgaagtagtttctaatatgaggaaaatgatcgaatcaaaacgtcctctatacatcactcttcacttggcgtgtggatttggtaagactattaccacgtgttatcttatggctacacacggtagaaaaaccgtcatttgcgtacccaataaaatgttaatacatcaatggaagacacaggtagaggcagtcggattggaacataagatatccatagatggagtaagtagtctattaaaggaactaaagactcaaagtccggatgtattaatagtagtcagtagacatctgacaaacgatgccttttgtaaatatatcaataagcattatgatttgttcatcttggatgaatcacatacgtataatctgatgaacaatacagcagttacaagatttttagcgtattatcctccgatgatgtgttattttttaactgctacacctagaccatctaaccgaatttattgtaacagtattattaatattgccaagttatccaatctaaaaaaaactatctatgcagtagatagtttttttgagccatattccacagataatattagacatatggtaaaacgactagatggaccatctaataaatatcatatatataccgagaagttattatctgtagacgagcctagaaatcaacttattcttgataccctggtagaagaattcaagtcaggaactattaatcgcattttagttattactaaactacgtgaacatatggtattattctacaaacgattattagattttttcggaccagaggttgtatttataggagacgcccaaaatagacgtactccagatatggtcaaatcaatcaaggaactaaatagatttatattcgtatccaccttattttattccggtactggtttagatattcctagtttggattcgttgttcatttgctcggcagtaatcaacaatatgcaaatagagcaattactagggagggtatgtcgagaaacagaactattagataggacggtatatgtatttcctaacacatccatcaaagaaataaagtacatgataggaaatttcatgcaacgaattattagtctgtctgtagataaactaggatttaaacaaaaaagttatcggaaacatcaagaatccgatcccacttctgcatgtacaacatcatccagagaagaacgtgtattaaatagaatatttaactcgcaaaatcgttaagaagtttaagcgacgatccgcatgctgcgcaggccagtgtattacccctcatagtattaatataatccaatgatacttttgtgatgtcggaaatcttaaccaatttagactgacaggcagaacacgtcatgcaatcatcatcgtcatcgataactgtagtcttgggcttctttttgcgactcttcattccggaacgcacattggtgctatccatttaggtagtaaaaaataagtcagaatatgccctataacacgatcgtgcaaaacctggtatatcgtctctatctttatcacaatatagtgtatcgacatttttattattattgacctcgtttatcttggaacatggaatgggaacatttttgttatcaacggccatctttgccttaattccagatgttgtaaaattataactaaacagtctatcatcgacacaaatgaaattcttgtttagacgtttgtagtttacgtatgcggctcgttcgcgtctcattttttcagatattgcaggtactataatattaaaaataagaatgaaataacataggattaaaaataaagttatcatgacttctagcgctgatttaactaacttaaaagaattacttagtctgtacaaaagtttgagattttcagattctgcggctatagaaaagtataattctttggtagaatggggaacatctacttactggaaaataggcgtgcaaaaggtagctaatgtcgagacgtcaatatctgattattatgatgaggtaaaaaataaaccgtttaatattgatccgggctattacattttcttaccggtatattttgggagcgtctttatttattcgaagggtaaaaatatggtagaacttggatctggaaactcttttcaaataccagatgatatgcgaagtgcgtgtaacaaagtattagacagcgataacggaatagactttctgagatttgttttgttaaacaatagatggataatggaagatgctatatcaaaatatcagtctccagttaatatatttaaactagctagtgagtacggattaaacatacccaaatatttagaaattgaaatagaggaagacacattatttgacgacgagttatactctattatagaacgctctttcgatgataaatttccaaaaatatccatatcgtatattaagttgggagaacttagacggcaagttgtagactttttcaaattctcattcatgtatattgagtccatcaaggtagatcgtataggagataatatttttattcctagcgttataacaaaatcaggaaaaaagatattagtaaaagatgtagaccatttaatacgatccaaggttagagaacatacatttgtaaaagtaaaaaagaaaaacacattttccattttatacgactatgatggaaacggaacagaaactagaggagaagtaataaaacgaattatagacactataggacgagactattatgttaacggaaagtatttctctaaggttggtagtgcaggcttaaagcaattgactaataaattagatattaatgagtgcgcaactgtcgatgagttagttgatgagattaataaatccggaactgtaaaacgaaaaataaaaaaccaatcagcatttgatttaagcagagaatgtttgggatatccagaagcggattttataacgttagttaataacatgcggttcaaaatagaaaattgtaaggttgtaaatttcaatattgaaaatactaattgtttaaataacccgagtattgaaactatatatggaaactttaaccagttcgtctcaatctttaatgtcgtcaccgatgtcaaaaaaagattattcgagtgaaataatatgcgcctttgatataggtgcaaaaaatcctgccagaactgttttagaagtcaaggataactccgttagggtattggatatatcaaaattagactggagttctgattgggaaaggcgcatagctaaagatttgtcacaatatgaatacactacagttcttctagaacgtcagcctagaaggtcgccgtatgttaaatttatctattttattaaaggctttttatatcatacatcggctgccaaagttatttgcgtctcgcctgtcatgtctggtaattcatatagagatcgaaaaaagagatcggtcgaagcatttcttgattggatggacacattcggattgcgagactccgttccggatagacgcaaattagacgatgtagcggatagtttcaatttggctatgagatacgtattagataaatggaatactaattatacaccttataataggtgtaaatctagaaattacataaaaaaaatgtaataacgttagtaacgccattatggataatctatttacctttctacatgaaatagaagatagatatgccagaactatttttaactttcatctaataagttgcgatgaaataggagatatatatggtcttatgaaagaacgcatttcctcagaggatatgtttgataatatagtgtataataaagatatacatcctgccattaagaaactagtgtattgcgacatccaacttactaaacacattattaatcagaatacgtatccggtatttaacgattcttcacaagtgaaatgttgtcattatttcgacataaactcagataatagcaatattagctctcgtacagtagagatatttgagagggaaaagtcatctcttgtatcatatattaaaactaccaataagaagagaaaggtcaattacggcgaaataaagaaaactgttcatggaggcactaatgcaaattacttttccggtaaaaagtctgacgagtatctgagtactacagttagatccaacattaatcaaccttggatcaaaaccatctctaagaggatgagagttgatatcattaatcactctatagtaacgcgtggaaaaagctctatattacaaactatagaaattatttttactaatagaacatgtgtgaaaatattcaaggattctactatgcacattattctatccaaggacaaggatgaaaaggggtgtatacacatgattgacaaattattctatgtctattataatttatttctgttgttcgaagatatcatccaaaacgagtactttaaagaagtagctaatgttgtaaaccacgtactcacggctacggcattagatgagaaattattcctaattaagaaaatggctgaacacgatgtttatggagttagcaatttcaaaatagggatgtttaacctgacatttattaagtcgttggatcataccgttttcccctctctgttagatgaggatagcaaaataaagttttttaaggggaaaaagctcaatattgtagcattacgatctctggaggattgtataaattacgtgactaaatccgagaatatgatagaaatgatgaaggaaagatcgactattttaaatagcatagatatagaaacggaatcggtagatcgtctaaaagaattgcttctaaaatgaaaaaaaacactaattcagaaatggatcaacgactagggtataagtttttggtgcctgatcctaaagccggagttttttatagaccgttacatttccaatatgtatcgtattctaattttatattgcatcgattgcatgaaatcttgaccgtcaagcggccactcttatcgtttaagaataatacagaacgaattatgatagaaattagcaatgttaaagtgactcctccagattactcacctataatcgcgagtattaaaggtaagagttatgacgcattagccacgttcactgtaaatatctttaaagaggtaatgaccaaagagggtatatccatcactaaaataagtagttatgagggaaaagattctcatttgataaaaattccgctactaataggatacgggaataaaaatccacttgatacagccaagtatcttgttcctaatgtcataggtggagtctttatcaataaacaatctgtcgaaaaagtaggaattaatctagtagaaaagattacaacatggccaaaatttagggttgttaagccaaactcattcactttctcgttttcctccgtatcccctcctaatgtattaccgacaagatatcgccattacaagatatctctggatatatcacaattggaagcgttgaatatatcatcgacaaagacatttataacggtcaatattgttttgctgtctcaatatttatctagagtgagtctagaattcattagacgtagtttatcatacgatatgcctccagaagttgtctatctagtaaacgcgataatagatagtgctaaacgaattactgaatctattactgactttaatattgatacatacattaatgacctggtggaagctgaacacattaaacaaaaatctcagttaacgatcaacgagttcaaatatgaaatgctgcataactttttacctcatatgaactatacacccgatcaactaaagggattttatatgatatctttactaagaaagtttctctactgtatcttccacacttctagatatccagatagagattcgatggtttgtcatcgcatcctaacgtacggcaaatattttgagacgttggcacatgatgaattagagaattacataggcaacatccgaaacgatatcatgaacaatcacaagaacagaggcacttacgcggtaaacattcatgtactaacaactcccggacttaatcacgcgttttctagcttattgagtggaaagttcaaaaagtcagacggtagttatcgaacacatcctcactattcatggatgcagaatatttctattcctaggagtgttggattttatccggatcaagtaaagatttcaaagatgttttctgtcagaaaataccatccaagtcaatatctttacttttgttcatcagacgttccggaaagaggtcctcaggtaggtttagtatctcaattgtctgtcttgagttccattacaaatatactaacgtctgagtatttggatttggaaaagaaaatttgtgagtatatcagatcatattataaagatgatataagttactttgaaacaggatttccaatcactatagaaaatgctctagtcgcatctcttaatccaaatatgatatgtgattttgtaactgactttagacgtagaaaacggatgggattcttcggtaacttggaggtaggtattactttagttagggatcacatgaatgaaattcgcattaatattggagcgggaagattagtcagaccattcttggttgtggataacggagagctcatgatggatgtgtgtccggagttagaaagcagattagacgacatgacattctctgacattcagaaagagtttccgcatgtcatcgaaatggtagatatagaacaatttacttttagtaacgtatgtgaatcggttcaaaaatttagaatgatgtcaaaggatgaaagaaagcaatacgatttatgtgactttcctgccgaatttagagatggatatgtagcatcttcattagtgggaatcaatcacaattctggacccagagctattcttggatgtgctcaagctaaacaagctatctcttgtctgagctcggatatacgaaataaaatagacaatggaattcatttgatgtatccagagaggccaatcgtgattagtaaggctttagaaacttcaaagattgcggctaattgcttcggccaacatgttactatagcattaatgtcgtacaaaggtatcaatcaagaggatggaattatcatcaaaaaacaatttattcagagaggcggtctcgatattgttacagccaagaaacatcaagtagaaattccattggaaaactttaataacaaagaaagagataggtctaacgcctattcaaaattagaaagtaatggattagttagactgaatgctttcttggaatccggagacgctatggcacgaaatatctcatcaagaactcttgaagatgattttgctagagataatcagattagcttcgatgtttccgagaaatataccgatatgtacaaatctcgcgttgaacgagtacaagtagaacttactgacaaagttaaggtacgagtattaaccatgaaagaaagaagacccattctaggagacaaatttaccactagaacgagtcaaaagggaacagtcgcgtatgtcgcggatgaaacggaacttccatacgacgaaaatggtatcacaccagatgtcattattaattctacatccatcttctctagaaaaactatatctatgttgatagaagttattttaacagccgcatattctgctaagccgtacaacaataagggagaaaaccgacctgtctgttttcctagtagtaacgaaacatccatcgatacatatatgcaattcgctaaacaatgttatgagcattcaaatccgaaattgtccgatgaagaattatcggataaaatcttttgtgaaaagattctctatgatcctgaaacggataagccttatgcatccaaagtattttttggaccaatttattacttgcgtctgaggcatttaactcaggacaaggcaaccgttagatgtagaggtaaaaagacgaagctcattagacaggcgaatgagggacgaaaacgtggaggaggtatcaagttcggagaaatggagagagactgtttaatagcgcatggtgcagccaatactattacagaagttttgaaagattcggaagaagattatcaagatgtgtatgtttgtgaaaattgtggagacatagcagcacaaatcaagggtattaatacatgtcttagatgttcaaaacttaatctctctcctctcttaacaaaaattgataccacgcacgtatctaaagtatttcttactcaaatgaacgccagaggcgtaaaagtcaaattagatttcgaacgaaggcctccttcgttttataaaccattagataaagttgatctcaagccgtcttttctggtgtaatattctagtttggtagtagatacatatcaatatcatcaaattcgagatccgaattataaaatgggcgtggattgttaactatagaatcggacgtctgatattcgaaaatctgtggagtttcaggttttggtggaggtgtaactgctacttgggatactgaagtctgatattcagaaagctgtggatgttctggttcggcatccaccgatggtgtcacatcactaatcggttcggtaacgtctgtggatggaggtgctacttctacagaacctgtagcctcagttgtcaacggagatacatttttaatgcgagaaaatgtataatttggtaatggtttcttatgtggatctgaagaagaggtaagatatctactagaaagataccgatcacgttctagttctcttttgtagaacttaactttttctttctccgcatctagttgatattccaacctcttcacgttactacgttcagattccaattcacgttcgcatgggttacctccgcagtttttacgagcgatttcacgttcagccttcatgcgtctctccctctctctatcgagtttatcagagcagtctttctgaaggcgatcgaactccataaatttctccaacgctttgattgtttccatagatttccgaagttcagcttttaggactgtgattctttttctttcgaattcacagctggatgtacaaccgtttccattaccgccatctctaagtttcttttctagatcggcaacatttcatccccatgccttttacattcctcgagtctactgtcgtcgaaatatcgttccagctccttttcgacatcaataactttagcacgttgtctctcaagctctcttttgtagttatctgattccctggcacgtttaagatcttcatgcaattgagtcagctcttaacttcctctcttgcttcttcgtcatagtacgcgcaatcactgtgagatccattgttaccacgtctacactcggcgagctcgcgtttaagagattcaatttcccgtttgtattggtccatgtttccattgctaccaccattagatttacaggctgctagttgtcgttcgagatcagaaatacgggttttcttggaattgatttcgtcgatgtacttggcatcgaaacacttattaagttctttttccaattctacgattttatttctttcgcgagtcaattccctcctgtagtaactatctgttttgtcagattcacgctctctacgtagactttcttgcaagttactaatttgttccctagcacgtccgagtttagttttatatgctgaatagagttctgattcatcctttgagcagatctctagcgatcgtttaagattcctaattctagtctttagcctatttacctcctcagaagatgttccgttaccgttgcgtttacactcgttaagctgtctatcaagatccatgattctatctctaagacgttgcatctctctttccatatcagcattgctttcattattacgtctgcagtcactcaactgtctttcaatatctgagattctatctctaagacgtcgcatctctctctgtttcggcattggtttcattattacgtttacagtcgttcaactgtctttcaagatctgatattctagattggagtctgctaatctctgtagcattttcacggcattcactcagttgtctttcaagatctgaaattttagattggagtctgctaatctctgtaagatttcctcctccgctctcgatgcagtcggtcaacttattctctagttctctaatacgcgaacgcagtgcatcaacttcttgcgtgtcttcctggttgcgtgtacattcatcgagatctctaacgcgtcgtcgttcttcctcaagttctctgcgtactacagaaagcgtgtccctatcttgttgatatttagcaatttctgattctagagtactgattttgcttacgtagttactaatagttgtcttggccttatcaagatcctccttgtatttgtcgcattccttgatatccctacgaagtctggacagttcccattcgacattacgacgtttatcgatttcagctcggagatcgtcatcgcgttgttttagccacatacgactgagttcaagttctcgttgacaagatccatctacttttccattcctaatagtatccagttccttttctagttctgaacgcatttctcgttccctatcaagcgattctctcaattctcggatagtcttcttatcaatttctaataaatctgaaccatcatctgtcccattttgaatatccctgtgttctttgatctcttttgtaagtcggtcgattctttcggttttataaacagaatccctttccaaagtcctaatcttactgagtttatcactaagttctgcattcaattcggtgagttttctcttggcttcttccaactctgttttaaactctccactatttccgcattcttcctcgcatttatctaaccattcaattagtttattaataactagttggtaatcagcgattcctatagccgttcttgtaattgtgggaacataattaggatcttctaatggattgtatggcttgatagcatcatctttatcattattagggggatggacaaccttaattggttggtcctcatctcctccagtagcgtgtggttcttcaataccagtgttagtaataggcttaggcaaatgcttgtcgtacgcgggcacttcctcatccatcaagtatttataatcgggttctacttcagaatattcttttctaagagacgcgacttcgggagttagtagaagaactctgtttctgtatctatcaacgctggaatcaatactcaagttaaggatagcgaatacctcatcgtcatcatccgtatcttctgaaacaccatcatatgacatttcatgaagtctaacgtattgataaatagaatcagatttagtattaaacagatccttaacctttttagtaaacgcatatgtatattttagatctccagatttcataatatgatcacatgccttaaatgtcagtgcttccatgatataatctggaacactaatgggtgacgaaaaagatacagcaccatatgctacgttgataaataaatctgaaccactaagtagataatgattaatgttaagaaagaggaaatattcagtgtataggtatgtcttggcgtcatatcttgtactaaacacgctaaacagtttgttaatgtgatcaatttccaatagattaattagagcagcgggaataccaacaaacatattaccacatccgtattttctatgaatatcacatatcatgttaaaaaatcttgatagaagagcgaatatctcgtctgacttaatgagtcgtagttcagcagcaacataagtcataactgtaaatagaacatactttcctgtagtgttgattctagactccacatcaacaccattattaaaaatagttttatatacatctttaatctgctctccgttaatcgtcgaacgttctagtatacggaaacactttgatttcttatctgtagttaatgacttagtgatatcacgaagaatattacgaattacatttcttgtttttcttgagagacctgattcagaactcaactcatcgttccatagtttttctacctcagtggcgaaatctttggagtgcttggtacatttttcaataaggttcgtgacctccatttattataaaaaatttattcaaaacttaactacaatcgggtaattataagatcgtagatctcccatgtggcggaatactaccatctatcgcatgtggatggacagtaggtaatggccatgggaacagtaatgtttgcatatttatctttcttgctagtattactgcatattgtcccaatgtttcgatgtgatgttctaacctatcaactgccgctgtatcacaacaatagtgtccgatgaaattaagattatgatccaatgtgtttaatatatgattatcaagtcttatacgatccgcgtcttttttgacaggatcaggttcttctacaggaagaagtttcggcctcttatgatattcatgtctgggaaacggtggtctagggtgaggctccggtatcggagtgggttttggattataatcatcatcgtctatgacatcatcttcgacttcgatatttattttgctatcttgatgatgtcctgtatcagttgcattttcagcactcgactgaatattagcgcattcattgtctattattaccatatttctaaacccaaaatgtatgtgttgaacatcagtactatcgttgatgagtcttatagcatgaattcgcttatcgttatcgggtttatcttctgtcaccttagcaattccttttttattaaactctacataatcatatccatttctattgtttgttctaatataaacgagtatagcatcattgctaaatttttcaatagtatcaaaaacagaatatcctaaaccatataatatatattcaggaacactcaaactaaatgtccaggattctcctaaatacgtaaactttaatagtgcgaaatcattcaaaaatctaccacttatagatagatagtacataaatgcgtatagtagtctacctatctctttattatgaaaaccggcattacgatcatatatgtcgtgatatacctgtgatccgtttacgttaaaccataaatacatgggtgatcctataaacatgaatttatttctaattctcagagctatagttaattgaccgtgtaatatttgcttacatgcatacttgatacgcttattaataagatttttatcattgctcgttatttcagaatcgtatatataaggagtaccatcgtgattcttaccagatattatacaaaatactatatataaaatatattgacccacgttagtaatcatataaatgtttaacgttttaaattttgtattcaatgatccattatcatacgctatcatggtcttgtaatattcattctttaaaatataatattgtgttagccattgcattggagctcctaatggagattttctattctcatccattttaggataggctttcataaagtccctaataacttcgtgaataatgtttctatgttttctactgatgcatgtatttgcttcgatttttttatcccatgtttcatctatcatagatttaaacgcagtaatgctcgcaacattaacatcttgaaccgttggtacaattccgttccataaatttataatgttcgccatttatataactcattttttgaatatacttttaattaacaaaagagttaagttactcatatggacgccgtccagtctgaacatcaatctttttagccagagatatcatagccgctcttagagtttcagcgtgattttccaacctaaatagaacttcatcgttgcgtttacaacacttttctatttgttcaaactttgttgttacattagtaatctttttttccaaattagttagccgttgtttgagagtttcctcattgtcgtcttcatcggctttaacaattgcttcgcgtttagcctctggctttttagcagcctttgtagaaaaaaattcagttgctggaattgcaagatcgtcatctccggggaaaagagttccgtccatttaaagtacagattttagaaactgacactctgcgttatttatatttggtacaacacatggattataaatattgatgttaataacatcagaaaatgtaaagtctatacattgttgcatcgtgttaaattttctaatggatctagtattattgggtccaacttctgcctgaaatccaaatatggaagcggatacaaaaccgtttcctggataaaccacacatctccacttttgctttacatcagaaattgtgtcgttgacatcttgaactctcctatctaatgccggtgttccacctatagattttgaatattcgaatgctgcatgagtagcattaaattccttaatattgccataattttcatatattgagtaaccctggataaaaagtaaacacaccgcagccgtcgctaccacaataaaaaaaattgatagagagttcatttataatctattagaagctgacaaaatttttttacacgcatcagacaatgctttaataaatagttcaacatctacttttgtcatatcgaaccgatggtatgattctaacctagaattacatccgaaaaagttgactatgttcatagtcattaagtcattaacaaacaacattccagactctggattataagacgatactgtttcgtcacaattacctaccttaatcatgtgattatgaatattggctattagagcaccttctaagaaatctataatatctttgaaacacgatttaaaatcaaaccacgaatatacttctacgaagaaagttagtttacccataggagaaataactataaatggagatctaaatacaaaatccggatctatgatagttttaacattattatattctctattaaatacctccacatctaaaaatgttaattttgaaactatgtcttcgtttattaccgtacctgaactaaacgctataagctctattgtttgagaactctttaaacgatattcttgaaatacatgtaacaaagtttcctttaactcggtcggtttatctaccatagttacagaatttgtatccttatctataatataataatcaaaatcgtataaagttatataattatcgcgttcagattgtgatcttttcaaatagactaaaaaccccatttctctagtaagtatcttatgtatatgtttgtaaaatatcttcatggtgggaatatgctctaccgcagttagccattcctcattgacagcggtagatgtattagacaaaactattccaatgtttaacaagggccattttacgagattattaaatccttgtttgataaatgtagccaatgagggttcgagttcaacgacgattgaattctcttcccgcggatgctgcatgatgaacgacgggatgttgttcgattgatttggaattctttttcgactttttgtttatattaaatattttaaaatttatagcggatagcaattcatgtaccacggataatgtagacgcgtattgcgcatcgatatctttattattagataaatttatcaataaatgtgagaagtttgcctcgttaaggtcttccatttaaatattatataaacatttgtgtttgtatcttattcgtcttttatggaatagttttttactagtaaagctgcaattacacactttgtccgtaaaacataaatataaacaccagcttttatcaatcgttccaaaaagtcgacggcggacatttttaacatggcatctattttaaatacacttaggtttttggaaaaaacatcattttataattgtaacgattcaataactaaagaaaagattaagattaaacataagggaatgtcatttgtattttataagccaaagcattctaccgttgttaaatacttgtctggaggaggtatatatcatgatgatttggttgtattggggaaggtaacaattaataatctaaagatgatgctattttacatggatttatcatatcatggagtgacaagtagtggagcaatttacaaattgggatcgtctatcgatagactttctctaaataggactattgttacaaaagttaataattatgatgatacattttttgacgacgatgattgatcgctattgcacaattttgtttttgtactttctaatatagtgtttaggttctttttcatatgagaatattgatttactaaaatatctatgtttaacttttgttctatgacgtccttatcggcggtatcggtacatatacgtaattcaccttcacaaaatacggagtcttcgataataatagccaatcgattattggatctagctgtctgtatcatattcaacatgtttaatatatcctttcgtttcccctttacaggcatcgatcgtagcatattttccgcgtctgatatggaaatgttaaaactacaaaaatgcgtaatgttagcccgtcctaatattggtacgtgtctataagtttggcatagtagaataatagacgtgtttaaatgccttccaaagtttaagaattctattagagtattgcattttgatagtttatcgcctacatcatcaaaaataagtaaaaagtgtgctgattttttatgattttgtgcgacagcaatacatttttctatgttacttttagttcgtatcagattatattctagagattcctgactactaacgaaattaatatgatttggccaaatgtatccatcataatctgggttataaacgggtgtaaacaagaatatatgtttatattttttaactagtgtagaaaacagagatagtaaatagatagtttttccagatccagatcctcctgttaaaaccattctaaacggcatttttaataaattttctcttgaaaattgtttttcttggaaacaattcataattatatttacagttactaaattaatttgataataaatcaaaatatggaaaactaaggttgttagtagggaggagaacaaagaaggcacatcgtgatataaataacatttattatcatgatgacaccagaaaacgacgaagagcagacatctgtgttctccgctactgtttacggagacaaaattcagggaaagaataaacgcaaacgcgtgattggtctatgtattagaatatctatggttatttcactactatctatgattaccatgtccgcgtttctcatagtgcgcctaaatcaatgcatgtctgctaacgaggctgctattactgacgccgctgttgccgttgctgctgcatcatctactcatagaaaggttgcgtctagcactacacaatatgatcacaaagaaagctgtaatggtttatattaccagggttcttgttatatattacattcagactaccagttattctcggatgctaaagcaaattgcactgcggaatcatcaacactacccaataaatccgatgtcttgactacctggctcattgattatgttgaggatacatggggatctgatggtaatccaattacaaaaactacatccgattatcaagattctgatgtatcacaagaagttagaaagtatttttgtgttaaaacaatgaactaatatttatttttgtacattaataaatgaaatcgcttaatagacaaactgtaagtaggtttaagaagttgtcggtgccggccgctataatgatgatactctcaaccattattagtggcataggaacatttctgcattacaaagaagaactgatgcctagtgcttgcgccaatggatggatacaatacgataaacattgttatttagatactaacattaaaatgtctacagataatgcggtttatcagtgtcgtaaattacgagctagattgcctagacctgatactagacatctgagagtattgtttagtattttttataaagattattgggtaagtttaaaaaagaccaatgataaatggttagatattaataatgataaagatatagatattagtaaattaacaaattttaaacaactaaacagtacgacggatgctgaagcgtgttatatatacaagtctggaaaactggttaaaacagtatgtaaaagtactcaatctgtactatgtgttaaaaaattctacaagtgacaacaaaaaatgaattaataataagtcgttaacgtacgccgccatggacgccgcgtttgttattactccaatgggtgtgttgactataacagatacattgtatgatgatctcgatatctcaatcatggactttataggaccatacattataggtaacataaaaactgtccaaatagatgtacgggatataaaatattccgacatgcaaaaatgctactttagctataagggtaaaatagttcctcaggattctaatgatttggctagattcaacatttatagcatttgtgccgcatacagatcaaaaaataccatcatcatagcatgcgactatgatatcatgttagatatagaagataaacatcagccattttatctattcccatctattgatgtttttaacgctacaatcatagaagcgtataacctgtatacagctggagattatcatctaatcatcaatccttcagataatctgaaaatgaaattgtcgtttaattcttcattctgcatatcagacggcaatggatggatcataattgatgggaaatgcaatagtaattttttatcataaaagttgtaaagtaaataataaaacaataaatattgaactagtagtacgtatattgagcaatcagaaatgatgctggtacctcttatcacggtgaccgtagttgcgggaacaatattagtatgttatatattatatatttgtaggaaaaagatacgtactgtctataatgacaataaaattatcatgacaaaattaaaaaagataaagagttctaattccagcaaatctagtaaatcaactgatagcgaatcagactgggaggatcactgtagtgctatggaacaaaacaatgacgtagataatatttctaggaatgagatattggacgatgatagcttcgctggtagtttaatatgggataacgaatccaatgttatggcgcctagcacagaacacatttacgatagtgttgctggaagcacgctgctaataaataatgatcgtaatgaacagactatttatcagaacactacagtagtaattaatgaaacggagactgttgaagtacttaatgaagataccaaacagaatcctaactattcatccaatcctttcgtaaattataataaaaccagtatttgtagcaagtcaaatccgtttattacagaacttaacaataaatttagtgagaataatccgtttagacgagcacatagcgatgattatcttaataagcaagaacaagatcatgaacacgatgatatagaatcatcggtcgtatcattggtgtgattagtttcctttttataaaattgaagtaatatttagtattattgctgccgtcacgttgtacaaatggagatattccctgtattcggcatttctaaaattagcaattttattgctaataatgactgtagatattatatagatacagaacatcaaaaaattatatctgatgagatcaatagacagatggatgaaacggtacttcttaccaacatcttaagcgtagaagttgtaaatgacaatgagatgtaccatcttattcctcatagattatcgacgattatactctgtattagttctgtcggaggatgtgttatctctatagataatgacatcaatggcaaaaatattctaacctttcccattgatcatgctgtaatcatatccccactgagtaaatgtgtcgtagttagcaagggtcctacaaccatattggttgttaaagcggatatacctagcaaacgattggtaacatcgtttacaaacgacatactatatgtaaacaatctgtcactgattaattatttgccgttgtctgtattcattattagacgagtcaccgactatttggatagacacatatgcgatcagatatttgctaataataagtggtattcccttataaccatcgacgataagcaatatcctattccatcaaactgtataggtatgtcctctgccaagtacataaattctagcatcgagcaagatactttaatccatgtttgtaacctcgagcatccgttcgactcagtatacaaaaaaatgcagtcgtacaattctctacctatcaaggaacaaatattgtacggtagaattgataatataaatatgagcattagtatttctgtggattaatagatttctagtatggggatcattaatcatctctaatctctaaatacctcataaaacgaaaaaaaagctattatcaaatactgtacggaatggattcattctcttctctttttatgaaactctgttgtatatctactgataaaactggaagcaaaaaatctgatagaaagaataagaataagatcaaggattatatggaacacgattattataaaataacaatagttcctggttcctcttccacgtctactagctcgtggtattatacacatgcctagtaatagtctctttgcgttgacggaaagcagactagaaataacaggctaaaatgttcagacaccataatagttcccaacccagataataacagagttccatcaacacattcctttaaactcaatcccaaacccaaaaccgttaaaatgtatccggccaattgatagtagataatgaggtgtacagcgcatgataatttacacagtaaccaaaatgaaaatactttagtaattataagaaatatagacggtaatgtcatcatcaacaatccgataatatgcctgagagtaaacattgacggataaaacaaaaatgctccgcataactctatcatggcaataacacaaccaaatacttgtaagattcctaaattagtagaaaatacaacgaatatcgatgtataagtgatctcgagaaataataagaataaagtaatgcccgtaaagataaacatcaacattgtttggtaatcattaaaccaattagtatgaagttgaactaatttcacagtagattttattccagtgttatcctcgcatgtataagtacctggtaagatatctttatattccataatcaatgagacatcactatctgataacgaatgaagtctagcactagtatgccatttacttaatattgtcgtcttggaagttttattataagttaaaatatcatggttatccaatttccatctaatatactttgtcggattatctatagtacacggaataatgatggtatcattacatgctgtatactctatggtctttgtagttgttataacaaccaacgtatagaggtatatcaacgatattctaactcttgacattttttatttatttaaaatgatacctttgttatttattttattctattttgctaacggtattgaatggcataagtttgaaacgagtgaagaaataatttctacttacttattagacgacgtattatacacgggtgttaatggggcggtatacacattttcaaataataaactaaacaaaactggtttaactaataataattatataacaacatctataaaagtagaggatgcggataaggatacattagtatgcggaaccaataacggaaatcccaaatgttggaaaatagacggttcagacgacccaaaacatagaggtagaggatacgctccttatcaaaatagcaaagtaacgataatcagtcacaacggatgtgtactatctgacataaacatatcaaaagaaggaattaaacgatggagaagatttgacggaccatgtggttatgatttattcacggcggataacgtaattccaaaagatggtttacgaggagcattcgtcgataaagacggtacttatgacaaagtttacattcttttcactgatactatcggctcaaagagaattgtcaaaattccgtatatagcacaaatgtgcctaaacgacgaaggtggtccatcatcattgtctagtcatagatggtcgacgtttctcaaagtcgaattagaatgtgatatcgacggaagaagttatagacaaattattcattctagaactataaaaacagataatgatacgatactatatgtattcttcgatagtccttattccaagtccgcattatgtacctattctatgaataccattaaacaatctttttctacgtcaaaattggaaggatatacaaagcaattgccgtctccagctcctggtatatgtttaccagctggaaaagttgttccacataccacgtttgaagtcatagaacaatataatgtactagatgatattataaagcctttatctaaccaacctatcttcgaaggaccgtctggtgttaaatggttcgatataaaggagaaggaaaatgaacatcgggaatatagaatatacttcataaaagaaaattctatatattcgttcgatacaaaatctaaacaaactcgtagctcgcaagtcgatgcgcgactattttcagtaatggtaactgcgaaaccgttatttatagcagatatagggataggagtaggaatgccacaaatgaaaaaaatacttaaaatgtaatcttaatcgagtacaccacacgacaatgaacaaacataagacagattatgctggttatgcttgctgcgtaatatgcggtctaattgtcggaattatttttacagcgacactattaaaagttgtagaacgtaaattagttcatacaccattaatagataaaacgataaaagatgcatatattagagaagattgtcctactgactggataagctataataataaatgtatccatttatctactgatcgaaaaacctgggaggaaggacgtaatgcatgcaaagctctaaattcaaattcggatctaattaagatagagactccaaacgagttaagttttttaagaagccttagacgaggctattgggtaggagaatccgaaatattaaaccagacaaccccatataattttatagctaagaatgccacgaagaatggaactaaaaaacggaaatatatttgtagcacaacgaatactcccaaactgcattcgtgttacactatataacaattacactacatttttatcataccactacttcggttagatgttttagaaaaaaataaatatcgccgtaccgttcttgtttttataaaaataacaattaacaattatcaaattttttctttaatattttacgtggttgaccattcttggtggtaaaataatctcttagtgttggaatggaatgctgtttaatgtttccacactcatcgtatattttgacgtatgtagtcacatcgtttacgcaatagtcagactgtagttctatcatgcttcctacatcagaaggaggaacagttttaaagtctcttggttttaatctattaccgttagttttcatgaaatcctttgttttatccacttcacattttaaataaatgtccactatacattcttttgttaattttactagatcgtcatgggtcatagaatttataggttccgtagtccatggatccaaactagcaaacttcgcgtatacggtatcgcgattagtgtatacaccaactgtatgaaaattaagaaaacagtttaataaatcaacagaaatatttaatcctccgtttgatacagatgcgccatatttatggatttcggattcacacgttgtttgtctgaggtgttcgtctagtgttgcttctacgtaaacttcgattcccatatattctttattgtcagaatcgcataccgatttatcatcatacactgtttgaaaactaaatggtatacacatcaaaataataaataataacgagtacattctgcaatattgttatcgtaattggaaaaatagtgttcgagtgagttggattatgtgagtattggattgtatattttattttatattttgtaataagaataaaatgctaatgtcaagtttattccaatagatgtcttattaaaaacatatataataaataacaatggctgaatggcataaaattatcgaggatatctcaaaaaataataagttcgaggatgccgccatcgttgattacaagactacaaagaatgttctagctgctattcctaacagaacatttgccaagattaatccgggtgaaattattcctctcatcactaatcgtaatattctaaaacctcttattggtcagaaatattgtattgtatatactaactctctaatggatgagaacacgtatgctatggagttgcttactgggtacgcccctgtatctccgatcgttatagcgagaactcataccgcacttatatttttgatgggtaagccaacaacatccagacgtgacgtgtatagaacgtgtagagatcacgctacccgtgtacgtgcaactggtaattaaaataaaaagtaatattcatatgtagtgtcaattttaaatgatgatgatgaaatggataatatccatattgacgatgtcaataatgccggtattggcatacagttcatcgatttttagatttcattcagaggatgtggaattatgttatgggcatttgtattttgataggatctataatgtagtaaatataaaatataatccgcatattccatatagatataattttattaatcgcacgttaaccgtagatgaactagacgataatgtcttttttacacatggttattttttaaaacacaaatatggttcacttaatcctagtttgattgtctcattatcaggaaacttaaaatataatgatatacaatgctcagtaaatgtatcgtgtctcattaaaaatttggcaacgagtacatctactatattaacatctaaacataagacttattctctacatcggtccacgtgtattactataataggatacgattctattatatggtataaagatataaatgacaagtataatgacatctatgattttactgcaatatgtatgctaatagcgtctacattgatagtgaccatatacgtgtttaaaaaaataaaaatgaactcttaattatgctatgctattagaaatggataaaatcaaaattacggttgattcaaaaattggtaatgttgttaccatatcgtataacttggaaaagataactattgatgtcacacctaaaaagaaaaaagaaaaggatgtattattagcgcaatcagttgctgtcgaagaggcaaaagatgtcaaggtagaagaaaaaaatattatcgatattgaagatgacgatgatatggatgtagaaagcgcgtaatacgatctataaaaataagtatataaatactttttatttactgtactcttactgtgtagtggtgataccctactcgattatttttttaaaaaaaaaatacttattctgattcttctagccatttccgtgttcgtttgaatgccacatcgacgtcaaagataggggagtagttgaaatctagttctgcattgttggtacgcacctcaaatgtagtgttggatatcttcaacgtatagttgttgagtagtgatggttttctaaatagaattctcttcatatcattcttgcacgcgtacatttttagcatccatcttggaatcctagatccttgttctattcccaatggtttcatcaatagaagattaaacatatcgtacgaacacgatggagagtaatcgtagcaaaagtaagcatttcctttaatcttagatcccggatactggatatattttgcagccaacacgtgcatccatgcagcatttcctacatatacccggctatgcaccgcgtcatcatcgactgtacgatacataatgttaccgtgttgcttacattgctcgtaaaagactttcatcaatttgtctccttctccgtaaattccagtgggtcttaggcaacaagtatacaattttgctccattcatgattacggaattattggctttcataaccagttgctcggccatacgtttactttttgcgtatacatgtcctggtgatatatcataaagggtatgctcatggccgatgaatggatcaccgtgtttattgggtcctattgcttccatgctactagtatagatcaaatacttgattcctaggtccacacaagctgccaaaatagtctgtgttccataatagtttactttcatgatttcattatcggtgtattttccaaatacatccactagagcagccgtatgaataatcagatttaccccatctagcgcttctctcaccttatcaaagtcgtttatatcacattgtatatagtttataaccttaactttcgaggttattggttgtggatcttctacaatatctatgactctgatttcttgaacatcatctgcactaattaacagttttactatatacctgcctagaaatccggcaccaccagtaaccgcgtacacggccattgctgccactcataatatcagactacttattctattttactaaataatggctgtttgtataatagaccacgataatatcagaggagttatttactttgaaccagtccatggaaaagataaagttttaggatcagttattggattaaaatccggaacgtatagtttgataattcatcgttacggagatattagtcaaggatgtgattccataggcagtccagaaatatttatcggtaacatctttgtaaacagatatggtgtagcatatgtttatttagatacagatgtaaatatatttacaattattggaaaggcgttatctatttcaaaaaatgatcagagattagcgtgtggagttattggtatttcttacataaatgaaaagataatacattttcttacaattaacgagaatggcgtttgatatatcagttaatgcgtctaaaacaataaatgcattagtttacttttctactcagcaaaataaattagtcatacgtaatgaagttaatgatacacactacactgtcgaatttgatagggacaaagtagttgacacgtttatttcatataatagacataatgacaccatagagataagaggggtgcttccagaggaaactaatattggttgcgcggttagtatgacttacttgtataataagtatagttttaaactgattttagcagaatatataagacacagaaatactatatccggcaatatttattcggcattgatgacactagatgatttggctattaaacagtatggagacattgatctattatttaatgagaaacttaaagtagactccgattcgggactatttgactttgtcaactttgtaaaggatatgatatgttgtgattctagaatagtagtagctctatctagtctagtatctaaacattgggaattgacaaataaaaaatataggtgtatggcattagccgaacatatatctgatagtattccaatatctgagctatctagactacgatacaatctatgtaagtatctacgcggacacactgagagcatagaggataaatttgattattttgaagacgatgattcgtctacatgttctgccgtaaccgacagggaaacggatgtataattttttttatagcgtgaaggatatgataaaaaatataattgttgtatttatcccattccaatcaccttatatgattctgtaacacaataaaggagtcttatagatgtatagaggtcagatactggtttgataaactgtttattccacataagtatgtttgactttatggttagacccgcatactttaacaaatcactgaaaattggagttaggtattgacctctcagaatcagttgccgttctggaacattaaatgtattttttatgatatactccaacgcatttatgtgggcatacaacaagtcattactaatggaatattccaagagttttagttgtctagtatttaacaagagaagagatttcaacagactgtttatgaactcgaatgccgcctcattgtcgcttatattgatgatgtcgaattctcccaatatcatcaccgatgagtagctcatcttgttatcgggatccaagttttctaaagatgtcattaaaccctcgatcatgaatggatttatcatcatcgtttttatgttggacatgagcttagtccgtttgtccacatctatagaagatgatttctgaattatttcatatatctctctctttaactccaggaacttgtcaggatggtctactttaatatgttctcgtctaagagatgaaaatctttggatggttgcacgcgacttttctctaaaggatgacgttgcccaagatcctctcttaaatgaatccatcttatccttggacaagatggacagtctattttccttagatggtttaatatttttgttacccatgatctataaaggtagacctaatcgtctcggatgaccatatatttattttcagttttattatacgcataaattgtaaaaaatatgttaggtttacgaaaatgtctcgtggggcattaatcgtttttgaaggattggacaaatctggaaaaacaacacaatgtatgaacatcatggaatcaataccttcaaacacaataaaataccttaactttcctcagagatccactgtcactggaaagatgatagatgactatctaactcgtaaaaaaacctataatgatcatatagttaatctattattttgtgcaaatagatgggagtttgcatcttttatacaagaacaactagaacagggaattactttaatagttgatagatacgcattttctggagtagcgtatgccgccgctaaaggcgcgtcaatgactctcagtaagagttatgaatctggattgcctaaacccgacttagttatattcttggaatctggtagcaaagaaattaatagaaacgtcggtgaggaaatttatgaagatgttacattccaacaaaaggtattacaagaatataaaaaaatgattgaagaaggagatattcattggcaaattatttcttctgaattcgaggaagatgtaaagaaggagttgattaagaatatagttatagaggctatacacacggttactggaccagtggggcaactgtggatgtaatagtgaaattacattttttataaatagatgttagtacagtgttataaatggatgaagcatattactctggcaacttggaatcagtactcggatacgtgtccgatatgcataccgaactcgcatcaatatctcaattagttattgccaagatagaaactatagataatgatatattaaacaaggacattgtaaattttatcatgtgtagatcaaacttggataatccatttatctctttcctagatactgtatatactattatagatcaagagaactatcagactgagttgattaattcattagacgacaatgaaattatcgattgtatagttaataagtttatgagcttttataaggataacctagaaaatatagtagatgctatcattactctaaaatatataatgaataatccagattttaaaactacgtatgccgaagtactcggttccagaatagccgatatagatattaaacaagtgatacgtaagaatatactacaattgtctaataatatccgcgaacgatatttgtgaaaatattaaaaaaaaatactttttttattaaatgacgtcttttcgtgaatttagaaaattatgctgtgctatatatcacgcatcaggatataaagaaaaatctaaattaattagagactttataacagatagggatgataaatatttgatcattaagctattgcttcccggattagacgatagaatttataacatgaacgataaacaaattataaaattatatagtataatatttaaacaatctcaggaagatatgctacaagatttaggatacggatatataggagacactattaggactttcttcaaagagaacacagaaatccgtccacgagataaaagcattttaactttagaagaagtggatagttttttaactacgttatcatccgtaactaaagaatcgcatcaaataaaattattgactgatgtagcatctgtttgtacatgtaatgatttaaaatgtgtagtcatgcttattgataaagatctaaaaattaaagcgggtcctcggtacgtacttaacgctattagtcctaatgcctatgatgtgtttagaaaatctaataacttgaaagagataatagaaaattcatctaaacaaaatctagactctatatctatttctgttatgactccaattaatcccatgttagcggaatcgtgtgattctgtcaataaggcgtttaaaaaatttccatcaggaatgtttgcggaagtcaaatacgatggtgaaagagtacaagttcataaaaataataacgagtttgccttctttagtagaaacatgaaaccagtactctctcataaagtggattatctcaaagaatacataccgaaagcatttaaaaaagctacgtctatcgtattggattctgaaattgttcttgtagacgaacataatgtaccgctcccgtttggaagtttaggtatacacaaaaagaaagaatataaaaactctaacatgtgtttgttcgtgtttgactgtttgtactttgatggattcgatatgacggacattccattgtacgaacgaagatcttttctcaaagatgttatggttgaaatacccaatagaatagtattctcagagttgacgaatattagtaacgagtctcagttaactgacgtattggatgatgcactaacgagaaaattagaaggattggtcttaaaagatattaatggagtatacgaaccgggaaagagaagatggttaaaaataaagcgagactatttgaacgagggttccatggcagattctgccgatttagtagtactaggtgcctactatggtaaaggagcaaagggtggtatcatggcagtctttctaatgggttgttacgacgatgaatccggtaaatggaagacggttaccaagtgttcaggacacgatgataatacgttaagggagttgcaagaccaattaaagatgattaaaattaacaaggatcccaaaaaaattccagagtggttagtagttaataaaatctatattcccgattttgtagtagaggatccgaaacaatctcagatatgggaaatttcaggagcagagtttacatcttccaagtcccataccgcaaatggaatatccattagatttcctagatttactaggataagagaggataaaacgtggaaagaatctactcatctaaacgatttagtaaacttgactaaatcttaatagttacatacaaactgaaaattaaaataacactatttagttggtggtcgccatggatggtgttattgtatactgtctaaacgcgctagtaaaacatggcgaggaaataaatcatataaaaaatgatttcatgattaaaccatgttgtgaaagagtttgtgaaaaagtcaagaacgttcacattggcggacaatctaaaaacaatacagtgattgcagatttgccatatatggataatgcggtatccgatgtatgcaattcactgtataaaaagaatgtatcaagaatatccagatttgctaatttgataaagatagatgacgatgacaagactcctactggtgtatataattattttaaacctaaagatgccattcctgttatcatatctataggaaaggataaagatgtctgtgaactattaatctcatcagacatatcgtgtgcatgcgtggagttaaattcatatcacgtagccattcttcccatggatgtttccttttttaccaaaggaaatgcatcattgattattctcctgtttgatttctctatcgatgcggcacctctcttaagaagtgtaaccgataataatgttattatatctagacaccagcgtctacatgacgagcttccgagttccaattggttcaagttttacataagtataaagtccgactattgttctatattatatatggttgttgatggatctgtgatgcatgcgatagctgataatagaactcacgcaattattagcaaaaatatattagacaatactacgattaacgatgagtgtagatgctgttattttgaaccacagattaggattcttgatagagatgagatgctcaatggatcatcgtgtgatatgaacagacattgtattatgatgaatttacctgatgtaggcgaatttggatctagtatgttggggaaatatgaacctgacatgattaagattgctctttcggtggctggtaatttaataagaaatcgagactacattcccgggagacgaggatatagctactacgtttacggtatagcctctagataatttttttaagcacgaaataaaaaacataattttaaaccaatctatttcatactattttgtgtgatcaccatggacataaagatagatattagtatttctggtgataaatttacggtgactactaggagggaaaatgaagaaagaaaaaaatatctacctctccaaaaagaaaaaactactgatgttatcaaacctgattatcttgagtacgatgacttgttagatagagatgagatgtttactattctagaggaatattttatgtacagaggtctattaggcctcagaataaaatatggacgactctttaacgaaattaaaaaattcgacaatgatgcggaagaacaattcggtactatagaagaactcaagcagaaacttagattaaattctgaagagggagcagataactttatagattatataaaggtacaaaaacaggatatcgtcaaacttactgtatacgattgcatatctatgataggattgtgtgcatgcgtggtagatgtttggagaaatgagaaactgttttctagatggaaatattgtttacgagcgattaaactgtttattgatgatcacatgcttgataagataaaatctatactgcagaatagactagtatatgtggaaatgtcatagaaagttaaaagttaatgagagcaaaaatatataaggttgtattccatatttgttatttttttctgtaatagttagaaaaatacattcgatggtctatctatcagattattatgtgttataaggtactttttctcataataaactagagtatgagtaagatagtgtttttcaaaacatataaatctaaaattgatggatgagatatacagctattaatttcgaaaatatattttaatctgataactttaaacatggatttttaatggtggtttaacgttttaaaaaaagattttgttattgtagtatatgataatattaaaagatggatataaagaatttgctgactgcatgtactattttttacattactacattggctacggcagatatacctacttcgtcactgccacacgctccggtaaacggggcatgtgacgagggagaatatcttgataagaggcataatcaatgttgtaatcagtgtccacctggagaatttgccaaggttagatgtaatggtaacgataacacaaaatgtgaacgctgcccacctcatacatataccgcaatccccaattactctaatggatgtcatcaatgtagaaaatgcccaacaggatcatttgataaggtaaagtgtaccggaacacagaacagtaaatgttcgtgtcttcctggttggtattgcgctactgattcttcacagactgaagattgtcgagattgtataccaaaaaggagatgtccatgcggatactttggtggaatagatgaacaaggaaatcctatttgtaaatcgtgttgtgttggtgaatattgcgactacctacgtaattatagacttgatccatttcctccatgcaaactatctaaatgtaattaattatgattttgatgataatgttaccatacattatatcgctacttggttagtgtattattcagtatgaagacctattaataattacttatcttttgacgatcttgttataattataatataaaaatacttatggcatagtaactcataattgctgacgcgataaattcgtaataatctgttttgttcaaatttttataaggaatctacaggcataaaaataaaaatataatttataatatactcttacagcgcgccatcatgaataacagcagtgaattgattgctgttattaatggatttagaaatagtggacgattttgtgatattaatatagttattaatgatgaaaggataaacgctcacagactcatcctatctggagcctccgaatatttttccattctgttttccaataattttatcgattctaatgaatacgaagttaatctaagtcatttagattatcaaagtgttaacgatttgatcgattacatttatgggatacctttgagcctaactaacgataacgtgaaatatattctttcaaccgctgattttttacaaattggatctgctattacggagtgtgaaaattacatacttaaaaatctttgttctagaaactgtatcgatttctacatatacgctgataaatataataacaagaaaatagaatcagcgtcgtttaacacaatattacaaaatattttgagactcatcaacgatgaaaactttaaatacttaacagaggaatcaatgataaaaattttaagcgatgatatgttaaatataaaaaatgaggatttcgccccactaattctcattaaatggttagagagtactcaacaaccatgcaccgtcgagttacttaaatgcctcagaatatcattgctttccccacaagttataaaatcactttatagtcatcgactggttagttcaatctacgaatgtataacattcttaaacaatatagcattcttggatgaatcatttcctagataccatagcatcgagttgatatctatcggtataagtaattcgcatgataagatttccataaactgctacaatcataaaaaaaatacatgggaaatgatatcttcacgtagatataggtgtagtttcgcagtggccgtcctggataatattatctatatgatgggtggatatgatcagtccccgtatagaagttcaaaggttatagcgtacaatacatgtacaaattcttggatatatgatataccagagctaaaatatcctcgttctaattgtgggggactggctgatgacgaatacatttattgtataggcggcatacgcgatcaggattcatcgttgacatctagtattgatagatggaagccatcaaaaccatattggcagaagtatgctaaaatgcgcgaaccaaaatgtgatatgggggttgcgatgttaaacggattaatatatgttataggtggaatcgttaaaggtgacacgtgtaccgacgcactagagagtttatcagaagatggatggatgaagcatcaacgtcttccaataaaaatgtccaatatgtcgacgattgttcatgatggcaagatttatatatctggaggttacaacaatagtagtgtagttaatgtaatatcgaatctagtccttagctataattcgatatatgatgaatggaccaaattatcatcattaaacattcctagaattaatcccgctctatggtcagcgcataataaattatatgtaggaggaggaatatctgatgatgttcgaactaatacatctgagacatacgacaaagaaaaagattgttggacattggataatggtcacgtgttaccacgcaattatataatgtataaatgcgaaccgattaaacataaatatccattggaaaaaacacagtacacgaatgattttctaaagtatttggaaagttttataggtagttgatagaacaaaatacataattttgtaaaaataaatcactttttatactaatatgacacgattaccaatacttttgttactaatatcattagtatacgctacaccttttcctcagacatctaaaaaaataggtgatgatgcaactctatcatgtaatcgaaataatacaaatgactacgttgttatgagtgcttggtataaggagcccaattccattattcttttagctgctaaaagcgacgtcttgtattttgataattataccaaggataaaatatcttacgactctccatacgatgatctagttacaactatcacaattaaatcattgactgctagagatgccggtacttatgtatgtgcattctttatgacatcaactacaaatgacactgataaagtagattatgaagaatactccacagagttgattgtaaatacagatagtgaatcgactatagacataatactatctggatctacacattcaccggaaactagttctgagaaacctgattatatagataattctaattgctcgtcggtattcgaaatctaagctcaaaaattgaaaaactagcgtctttttttgctcgaagtcgaccaccatggtgggtgaggatagcgtgctgatcaccgagaacatgcacatgaaactgtacatggagggcaccgtgaacgaccaccacttcaagtgcacatccgagggcgaaggcaagccctacgagggcacccagaccatgaagatcaaggtggtcgagggcggccctctccccttcgccttcgacatcctggctaccagcttcatgtacggcagcaaaacctttatcaaccacacccagggcatccccgacttctttaagcagtccttccctgagggcttcacatgggagaggatcaccacatacgaagacgggggcgtgctgaccgctacccaggacaccagcctccagaacggctgcctcatctacaacgtcaagatcaacggggtgaacttcccatccaacggccctgtgatgcagaagaaaacactcggctgggaggccagcaccgagatgctgtaccccgctgacagcggcctgagaggccatagccagatggccctgaagctcgtgggcgggggctacctgcactgctccctcaagaccacatacagatccaagaaacccgctaagaacctcaagatgcccggcttctacttcgtggacaggagactggaaagaatcaaggaggccgacaaagagacctacgtcgagcagcacgagatggctgtggccaggtactgcgacctgcctagcaaactggggcacagctgattaattaatttttatcgatctaattcaacaatgtctggagagcttcgcaggatcccgactccggaaccaattactgataaagaagatcatacagttacagacactgtctcatacactacagtaagtacatcatctggaattgtcactactaaatcaaccaccgatgatgcggatctttatgatacgtacaatgataatgatacagtaccaccaactactgtaggcggtagtacaacctctattagcaattataaaaccaaggactttgtagaaatatttggtattaccgcattaattatattgtcggccgtggcaattttctgtattacatattatatatataataaacgttcacgtaaatacaaaacagagaacaaagtctagatttttgacttacataaatgtctgggatagtaaaatctatcatattgagcggaccatctggtttaggaaagacagccatagccaaaagactatgggaatatatttggatttgtggtgtcccataccactagatttcctcgtcctatggaacgagaaggtgttgattaccattacgttaacagagaggccatctggaagggaatagccgccggaaactttctagaacatactgagtttttaggaaatatttacggaacttctaaaacagctgtgaatacagcggctattaataatcgtatttgtgtgatggatctaaacatcgacggtgttagaagtcttaaaaatacgtacctaatgccttactcggtgtatataagacctacctctcttaaaatggttgagaccaagcttcgtcgtagaaacactgaagctaacgatgagattcatcgtcgtgtgatgttggcaaaaactgacatggatgaggcaggtgaagccggtctattcgacactattatcattgaagatgatgtgaatttagcatatagtaagttaattcagatactacaggaccgtattagaatgtattttaacactaattagagacttaagacttaaaacttgataattaataatataactcgtttttatatgtgtctatttcaacgtctaatgtattagttaaatattaaaacttaccacgtaaaacttaaaatttaaaatgatatttcattgacagatagatcacacattatgaactttcaaggacttgtgttaactgacaattgcaaaaatcaatgggtcgttggaccattaataggaaaaggtggattcggtagtatttatactactaatgacaataattatgtagtaaaaatagagcccaaagctaacggatcattatttaccgaacaggcattttatactagagtacttaaaccatccgttatcgaagaatggaaaaaatctcacaatataaagcacgtaggtcttatcacgtgcaaggcatttggtctatacaaatccattaatgtggaatatcgattcttggtaattaatagattaggtgcagatctagatgcggtgatcagagccaataataatagactaccaaaaaggtcggtgatgttgatcggaatcgaaatcttaaataccatacaatttatgcacgagcaaggatattctcacggagatattaaagcgagtaatatagtcttagatcaaatagataagaataaattatatctagtggattacggattggtttctaaattcatgtctaatggcgaacatgttccatttataagaaatccaaataaaatggataacggtactctagaatttacacctatagattcgcataaaggatacgttgtatctagacgtggagatctagaaacacttggatattgtatgattagatggttgggaggtatcttaccatggactaagatatctgaaacaaagaattgtgcattagtaagtgccacaaaacagaaatatgttaacaatactgcgactttgttaatgaccagtttgcaatatgcacctagagaattgctgcaatatattaccatggtaaactctttgacatattttgaggaacccaattacgacaagtttcggcacatattaatgcagggtgtatattattaagtgtggtgtttggtcgataaaaattaaaaaataacttaatttattattgatctcgtgtgtacaaccgaaatcatggcgatgttttacgcacacgctctcggtgggtacgacgagaatcttcatgcctttcctggaatatcatcgactgttgccaatgatgtcaggaaatattctgttgtgtcagtttataataacaagtatgacattgtaaaagacaaatatatgtggtgttacagtcaggtgaacaagagatatattggagcactgctgcctatgtttgagtgcaatgaatatctacaaattggaaatccgatccatgatcaagaaggaaatcaaatctctatcatcacatatcgccacaaaaactactatgctctaagcggaatcgggtacgagagtctagacttgtgtttggaaggagtagggattcatcatcacgtacttgaaacaggaaacgctgtatatggaaaagttcaacatgattattctactatcaaagagaaggccaaagaaatgagtgcacttagtccaggacctatcatcgattaccacgtctggataggagattgtatctgtcaagttactgctgtggacgtacatggaaaggaaattatgaaaatgagattcaaaaagggtgcggtgcttccgatcccaaatctggtaaaagttaaacttggggagaatgatacagaaaatctttcttctactatatcggcggcaccatcgaggtaaccacctctctggaagacagcgtgaatcatgtactcatgaaacgtttggaaactatacgccatatgtggtctgttgtatatgatcattttgatattgtgaatggtaaagaatgctgttatgtgcatacgcattcatctaatcaaaatcctataccgagtactgtaaaaacaaatttgtacatgaagactatgggatcatgcattcaaatggattccatggaagctctagagtatcttagcgaactgaaggaatcaggtggatggagtcccagaccagaaatgcaggaatttgaatatccagatggagtggaagacactgaatcaattgagagattggcagaggagttcttcaatagatcagaacttcaggctggtgaatcagtcaaatttggtaattctattaattgttaaacatacatctgtttcagctaagcaactaagaacacgtatacggcagcagcttccttctatactctcatcttttaccaacacaaagggtggatatttgttcattggagttgataataatacacacaaagtatttggattcacggtgggttacgactacctcagactgatagagaatgatatagaaaagcatatcaaaagacttcgtgttgtgcatttctgtgagaagaaagaggacatcaagtacgcgtgtcgattcatcaaggtatataaacctggggatgagactacctcgacatacgtgtgcgctatcaaagtggaaagatgctgttgtgctgtgtttgcagattggccagaatcatggtatatggatactaatggtatcaagaagtattctccagatgaatgggtgtcacatataaaattttaattaatgtaactatagagaacaaataataaggttgtaatatcatatagacaataactaacaattaattagtaactgttatctcttttttaactaaccaactaactatatacctattaatacatcgtaattatagttcttaacatctattaatcattaattcgcttctttaattttttataaactaacattgttaattgaaaagggataacatgttacagaatataaattatatatggatttttttaaaaaggaaatacttgactggagtatatatttatctcttcattatatagcacgcgtgttttccaatttttccacatcccatataatacaggattataatctcgttcgaacatacgagaaagtggataaaacaatagttgattttttatctaggttgccaaatttattccatattttagaatatggggaaaatattctacatatttattctatggatgatgctaatacgaatattataattttttttctagatagagtattaaatattaataagaacgggtcatttatacacaatctcgggttatcatcatccattaatataaaagaatatgtatatcaattagttaataatgatcatccagataataggataagactaatgcttgaaaatggacgtagaacaagacattttttgtcctatatatcagatacagttaatatctatatatgtattttaataaatcatggattttatatagatgccgaagacagttacggttgtacattattacatagatgtatatatcactataagaaatcagaatcagaatcatacaatgaattaattaagatattgttaaataatggatcagatgtagataaaaaagatacgtacggaaacacaccttttatcctattatgtaaacacgatatcaacaacgtggaattgtttgagatatgtttagagaatgctaatatagactctgtagactttaatagatatacacctcttcattatgtctcatgtcgtaataaatatgattttgtaaagttattaatttctaaaggagcaaatgttaatgcgcgtaataaattcggaactactccattttattgtggaattatacacggtatctcgcttataaaactatatttggaatcagacacagagttagaaatagataatgaacatatagttcgtcatttaataatttttgatgctgttgaatctttagattatctattatccagaggagttattgatattaactatcgtactatatacaacgaaacatctatttacgacgctgtcagttataatgcgtataatacgttggtctatctattaaacaaaaatggtgattttgagacgattactactagtggatgtacatgtatttcggaagcagtcgcaaacaacaacaaaataataatggaagtactattgtctaaacgaccatctttgaaaattatgatacagtctatgatagcaattactaaacataaacagcataatgcagatttattgaaaatgtgtataaaatatactgcgtgtatgaccgattatgatactcttatagatgtacagtcgctacagcaatataaatggtatattttaagatgtttcgatgaaatagatatcatgaagagatgttatataaaaaataaaactgtattccaattagttttttgtatcaaagacattaatactttaatgagatacggtaaacatccttctttcgtgaaatgcactagtctcgacgtatacggaagtcgtgtacgtaatatcatagcatctattagatatcgtcagagattaattagtctattatccaagaagctggatcctggagataaatggtcgtgttttcctaacgaaataaaatataaaatattggaaaactttaacgataacgaactatccacatatctaaaaatcttataaacattattaaaatataaaatctaagtaggataaaatcacactacatcattgtttccttttagtgctcgacagtgtatactatttttaacgctcataaataaaaatgaaaacgatttccgttgttacgttgttatgcgtactacctgctgttgtttattcaacatgtactgtacccactatgaataacgctaaattaacgtctaccgaaacatcgtttaatgataaccagaaagttacgtttacatgtgatcagggatatcattctttggatccaaatgctgtctgtgaaacagataaatggaaatacgaaaatccatgcaaaaaaatgtgcacagtttctgattatgtctctgaactatataataaaccgctatacgaagtgaattccaccatgacactaagttgcaacggcgaaacaaaatattttcgttgcgaagaaaaaaatggaaatacttcttggaatgatactgttacgtgtcctaatgcggaatgtcaacctcttcaattagaacacggatcgtgtcaaccagttaaagaaaaatactcatttggggaatatatgactatcaactgtgatgttggatatgaggttattggtgcttcgtacataagttgtacagctaattcttggaatgttattccatcatgtcaacaaaaatgtgatatgccgtctctatctaacggattaatttccggatctacattttctatcggtggcgttatacatcttagttgtaaaagtggttttacactaacggggtctccatcatccacatgtatcgacggtaaatggaatcccatactcccaatatgtgtacgaactaacgaaaaatttgatccagtggatgatggtcccgacgatgagacagatttgagcaaactctcgaaagacgttgtacaatatgaacaagaaatagaatcgttagaagcaacttatcatataatcatagtggcgttgacaattatgggcgtcatatttttaatctccgttatagtattagtttgttcctgtgacaaaaataatgaccaatataagttccataaattgctaccgtaaatataaatccgttaaaataattaataatttaataacaaacaagtatcaaaagattaaagacttatagctagaatcaattgagatgtcttcttcagtggatgttgatatctacgatgccgttagagcatttttactcaggcactattataacaagagatttattgtgtatggaagaagtaacgccatattacataatatatacaggctatttacaagatgcgccgttataccgttcgatgatatagtacgtactatgccaaatgaatcacgtgttaaacaatgggtgatggatacacttaatggtataatgatgaatgaacgcgatgtttctgtaagcgttggcaccggaatactattcatggaaatgtttttcgattacaataaaaatagtatcaacaatcaactaatgtatgatataattaatagcgtatctataattctagctaatgagagatatagaagcgcttttaacgacgatggtatatacatccgtagaaatatgattaacaagttgtacggatacgcatctctaactactattggcacgatcgctggaggtgtttgttattatctgttgatgcatctagttagtttgtataaataattatttcaatatactagttaaaattttaagattttaaatgtataaaaaactaataacgtttttatttgtaataggtgcattagcatcctattcgaataatgagtacactccgtttaataaactgagtgtaaaactctatatagatggagtagataatatagaaaattcatatactgatgataataatgaattggtgttaaattttaaagagtacacaatttctattattacagagtcatgcgacgtcggatttgattccatagatatagatgttataaacgactataaaattattgatatgtataccattgactcgtctactattcaacgcagaggtcacacgtgtagaatatctaccaaattatcatgccattatgataagtacccttatattcacaaatatgatggtgatgagcgacaatattctattactgcagagggaaaatgctataaaggaataaaatatgaaataagtatgatcaacgatgatactctattgagaaaacatactcttaaaattggatctacttatatatttgatcgtcatggacatagtaatacatattattcaaaatatgatttttaaaaatttaaaatatattatcacttcagtgacagtagtcaaataacaaacaacaccatgagatatattataattctcgcagttttgttcattaatagtatacatgctaaaataactagttataagtttgaatccgtcaattttgattccaaaattgaatggactggggatggtctatacaatatatcccttaaaaattatggcatcaagacgtggcaaacaatgtatacaaatgtaccagaaggaacatacgacatatccgcatttccaaagaatgatttcgtatctttctgggttaaatttgaacaaggcgattataaagtggaagagtattgtacgggactatgcgtcgaagtaaaaattggaccaccgactgtaacattgactgaatacgacgaccatatcaatttgtacatcgagcatccgtatgctactagaggtagcaaaaagattcctatttacaaacgcggtgacatgtgtgatatctacttgttgtatacggctaacttcacattcggagattctaaagaaccagtaccatatgatatcgatgactacgattgcacgtctacaggttgcagcatagactttgtcacaacagaaaaagtgtgcgtgacagcacagggagccacagaagggtttctcgaaaaaattactccatggagttcgaaagtatgtctgacacctaaaaagagtgtatatacatgcgcaattagatccaaagaagatgttcccaatttcaaggacaaaatggccagagttatcaagagaaaatttaatacacagtctcaatcttatttaactaaatttctcggtagcacatcaaatgatgttaccacttttcttagcatgcttaacttgactaaatattcataactaatttttattaatgatacaaaaacgaaataaaactgcatattatacactggttaacgcccttataggctctaaccattttcaagatgaggtccctgattatagtccttctgttcccctctatcatctactccatgtctattagacgatgtgagaagactgaagaggaaacatggggattgaaaatagggttgtgtataattgccaaagatttctatcccgaaagaactgattgcagtgttcatctcccaactgcaagtgaaggattgataactgaaggcaatggattcagggatatacgaaacaccgataaattataaaaaaagcaatgtgtccgctgtttccgttaataatactattttcgtaactggcggattattcataaataactctaatagcacgatcgtggttaacaatatggaaaaacttgacatttataaagacaaacaatggtcgattatagaaatgcctatggctagggtatatcacggcattgactcgacatttggaatgttatattttgccggaggtctatccgttaccgaacaatatggtaatttagagaaaaacaacgagatatcttgttacaatcctagaacgaataagtggtttgatatttcatatactatttataagatatccatatcatcattgtgtaaactaaataacgtcttctatgtatttagtaaggacattggatatgtggaaaagtatgatggtgcatggaagttagtacatgatcgtctccccgctataaaggcattatcaacttctccttattgattgaaaatgaaaatataaatagtttttatgtatagcagtattaccctatagttttattgcttactactaacatggatacagatgttacaaatgtagaagatatcataaatgaaatagatagagagaaagaagaaatactaaaaaatgtagaaattgaaaataataaaaacattaacaagaatcatcccaatgaatatattagagaagcactcgttattaataccagtagtaatagtgattccattgataaagaagttatagaatgtatcagtcacgatgtaggaatatagatcatatctactaatttttataatcgatacaaaacataaaaaacaactcgttattacatagcaggcatggaatccttcaagtattgttttgataacgatggcaagaaatggattatcggaaatactttatattctggtaattcaatactctataaggtcagaaaaaatttcactagttcgttctacaattacgtaatgaagatagatcacaaatcacacaagccattgttgtctgaaatacgattctatatatctgtattggatcctttgactatcgacaactggacacgggaacgtggtataaagtatttggctattccagatctgtatggaattggagaaaccgatgattatatgttcttcgttataaagaattcgggaagagtattcgccccaaaggatactgaatcagtcttcgaagcatgcgtcactatgataaacacgttagagtttatacactctcgaggatttacccatggaaaaatagaaccgaggaatatactgattagaaataaacgtctttcactaattgactattctagaactaacaaactatacaagagtggaaactcacatatagattacaacgaggacatgataacttcaggaaatatcaattatatgtgtgtagacaatcatcttggagcaacagtttcaagacgaggagatttagaaatgttgggatattgcatgatagaatggttcggtggcaaacttccatggaaaaacgaaagtagtataaaagtaataaaacaaaaaaaagaatataaaaaatttatagctactttctttgaggactgttttcctgaaggaaatgaacctctggaattagttagatatatagaattagtatacacgttagattattctcaaactcctaattatgacagactacgtaaactgtttatacaagattgaaattatattcttttttttatagagtgtggtagtgttacggatatctaatattaatattagactatctctatcgcgctacacgaccaatatcgattactatggatatcttctatgaaaggagagaatgtatttatttctccagcgtcaatctcgtcagtattgacaatactgtattatggagctaatggatccactgctgaacagctatcaaaatatgtagaaacggaggagaacacggataaggttagcgctcagaatatctcattcaaatccatgaataaagtatatgggcgatattctgccgtgtttaaagattcctttttgagaaaaattggcgataagtttcaaactgttgacttcactgattgtcgcactatagatgcaatcaacaagtgtgtagatatctttactgaggggaaaatcaatccactattggatgaaccattgtctcctagcaattagtgccgtatactttaaagcaaaatggttgacgccattcgaaaaggaatttaccagtgattatcccttttacgtatctccgacggaaatggtagacgtaagtatgatgtctatgtacggcaaggcatttaatcacgcatctgtaaaagaatcattcggcaacttttcaatcatagaactgccatatgttggagatactagtatgatggtcattcttccagacaagattgatggattagaatccatagaacaaaatctaacagatacaaattttaagaaatggtgtgactttatggatgctatgtttatagatgttcacattcccaagtttaaggtaacaggctcgtataatctggtggatactctagtaaagtcaggactgacagaggtgttcggttcaactggagattatagcaatatgtgtaatttagatgtgagtgtcgacgctatgatccacaaaacgtatatagatgtcaatgaagagtatacagaagcagctgcagcaacttctgtactagtggcagactgtgcatcaacaattacaaatgagttctgtgcagatcatccgttcatctatgtgattaggcatgttgatggaaaaattcttttcgttggtagatattgctctccgacaactaattgttaaccattttttttaaaaaaaatagaaaaaacatgtggtattagtgcaggtcgttgttcttccaattgcaattggtaagatgacggccaactttagtacccacgtcttttcaccacagcactgtggatgtgacagactgaccagtattgatgacgtcaaacaatgtttgactgaatatatttattggtcgtcctatgcataccgcaacaggcaatgcgctggacaattgtattccacactcctctcttttagagatgatgcggaattagtgttcatcgacattcgcgagctggtaaaaaatatgccgtgggatgatgtcaaagattgtacagaaatcatccgttgttatataccggatgagcaaaaaaccatcagagagatttcggccatcatcggactttgtgcatatgctgctacttactggggaggtgaagaccatcccactagtaacagtctgaacgcattgtttgtgatgcttgagatgctaaattacgtggattataacatcatattccggcgtatgaattgatgagttgtacatcttgacattttctttcttctcttctccctttcttctcttctcccttcctccctcttctccctttcccagaaacaaacttttttacccactataaaataaaatgagtatactacctattatatttcttcctatatttttttattcttcattcgttcagacttttaacgcgtctgaatgtatcgacaaagggcaatattttgcatcattcatggagttagaaaacgagccagtaatcttaccatgtcctcaaataaatacgctatcatccggatataatatattagatattttatgggaaaaacgaggagcggataatgatagaattataccgatagataatggtagcaatatgctaattctgaacccgacacaatcagactctggtatttatatatgcattaccacgaacgaaacctactgtgacatgatgtcgttaaatttgacaatcgtgtctgtctcagaatcaaatatagatcttatctcgtatccacaaatagtaaatgagagatctactggcgaaatggtatgtcccaatattaatgcatttattgctagtaacgtaaacgcagatattatatggagcggacatcgacgccttagaaataagagacttaaacaacggacacctggaattattaccatagaagatgttagaaaaaatgatgctggttattatacatgtgttttagaatatatatacggtggcaaaacatataacgtaaccagaattgtaaaattagaggtacgggatagaataataccttctactatgcaattaccagatggcattgtaacttcaataggtagtaatttgactattgcatgcagagtatcgttgagacctcccacaacggacaccgacgtcttttggataagtaatggtatgtattacgaagaagatgatggggacggaaacggtagaataagtgtagcaaataaaatctatatgaccgataagagacgtgttattacatcccggttaaacattaatcctgtcaaggaagaagatgctacaacgtttacgtgtatggcgtttactattcctagcatcagcaaaacagttactgttagtataacgtgaatgtatgttgttacatttccatgtcaattgagtttataagaatttttatacattatcttccaacaaacaattgacgaacgtattgctatgattaactcccacgatactatgcatattattaatcattaacttgcagactatacctagtgctattttgacatactcgtgttcttgtgtaattgcggtatctatattattaaagtacgtaaatctagctatagttttattatttaattttagataatataccgtctccttatttttaaaaattgccacatcctttattaaatcatgaatgggaatttctatgtcatcgttagtatattgtgaacaacaagagcagatatctataggaaagggtggaatgcgatacattgatctatgtagttttaaaacacacgcgaactttgaagaatttatataaatcattccatcgatacatccttctatgttgacatgtatatatccaggaattcttttattaatgtcaggaaatgtataaactaaaacattgcccgaaagcggtgcctctatctgcgttatatccgttcttaacttacaaaatgtaaccaatacctttgcatgacttgttttgttcggcaacgttagtttaaacttgacgaatggattaattacaatagcatgatccgcgcatctattaagtttttttactttaacgcccttgtatgtttttacagagactttatctaaatttctagtgcttgtatgtgttataaatataacgggatatagaaccgaatcacctaccttagatacccaattacattttatcagatccagataataaacaaattttgtcgccctaactaattctatattgttatatattttacaattggttatgatatcatgtaataacttggagtctaacgcgcatcgtcgtacgtttatacaattgtgatttagtgtagtatatctacacatgtatttttccgcactatagtattctggactagtgataaaactatcgttatatctgtcttcaatgaactcatcgagatattgctctctgtcatattcatacacctgcataaactttctagacatcttacaatccgtgttattttaggatcatatttacatatttacgggtatatcaaagatgttagattagttaatgggaatcgtctataataatgaatattaaacaattatatgaggacttttaccacaaagcatcataaaaatgagtcgtcgtctgatttatgttttaaatatcaaccgcaaatcaactcataaaatacaagagaatgaaatatatacatattttagtcattgcaatatagaccatacttctacagaacttgattttgtagttaaaaactatgatctaaacagacgacaacctgtaactgggtatactgcactacactgctatttgtataataattactttacaaacgatgtactgaagatattattaaatcatgacgtaaatgtaacgatgaaaaccagtagcggacgtatgcctgtttatatattgcttactagatgttgtaatatttcacatgatgtagtgatagatatgatagacaaagataaaaaccacttattacatagagactattccaacctattactagagtatataaaatctcgttacatgttattgaaggaagaggatatcgatgagaacatagtatccactttattagataagggaatcgatcctaactttaaacaagacggatatacagcgttacattattattatttgtgtctcgcacacgtttataaactaggtgagtgtagaaaaccgataacgataaaaaaggccaagcgaattatttctttgtttatacaacatggagctaatctaaacgcgttagataattgtggtaatacaccattccatttgtatcttagtattgaaatgtgtaataatattcatatgactaaaatgctgttgacttttaatccgaatttcaaaatatgtaataatcatggattaacgcctatactatgttatataacttccgactacatacaacacgatattcttgttatgttaatacatcactatgaaacaaatgttggagaaatgccgatagatgagcgtcgtatgatcgtattcgagtttatcaaaacatattctacacgtccggcagattcgataacttatttgatgaataggtttaaaaatataaatatttatacccgctatgaaggaaagacattattacacgtagcatgtgaatataataatacacaagtaatagattatcttatacgtatcaacggagatataaatgcgttaaccgacaataacaaacacgctacacaactcattatagataacaaagaaaattccccatataccattaattgtttactgtatatacttagatatattgtagataagaatgtgataagatcgttggtggatcaacttccatctctacctatcttcgatataaaatcatttgagaaattcatatcctactgtatacttttagatgacacattttacgataggcacgttaagaatcgcgattctaaaacgtatcgatacgcattttcaaaatacatgtcgtttgataaatacgatggtataataactaaatgtcacgacgaaacaatgttactcaaactgtccactgttctagacactacactatatgcagttttaagatgtcataattcgagaaagttaagaagatacctcaacgagttaaaaaaatataataacgataagtcctttaaaatatattctaatattatgaatgagagataccttaatgtatattataaagatatgtacgtgtcaaaggtatatgataaactatttcctgttttcacagataaaaattgtctactaacattactaccttcagaaattatatacgaaatattatacatgctgacaattaacgatctttataatatatcgtatccacctaccaaagtatagttgtatttttctcatgcgatgtgtgtaaaaaaactgatattatataaatattttagtgccgtataataaagatgacgatgaaaatgatggtacatatatatttcgtatcattattgttattgctattccacagttacgccatagacatcgaaaatgaaatcacagaattcttcaataaaatgagagatactctaccagctaaagactctaaatggttgaatccagcatgtatgttcggaggcacaatgaatgatatagccgctctaggagagccattcagcgcaaagtgtcctcctattgaagacagtcttttatcgcacagatataaagactatgtggttaaatgggagaggctagaaaagaatagacggcgacaggtttctaataaacgtgttaaacatggtgatttatggatagccaactatacatctaaattcagtaaccgtaggtatttgtgcaccgtaactacaaagaatggtgactgtgttcagggtatagttagatctcatattaaaaaacctccttcatgcattccaaaaacatatgaactaggtactcatgataagtatggcatagacttatactgtggaattctttacgcaaaacattataataatataacttggtataaagataataaggaaattaatatcgacgacattaagtattcacaaacgggaaaggaattaattattcataatccagagttagaagatagcggaagatacgactgttacgttcattacgacgacgttagaatcaagaatgatatcgtagtatcaagatgtaaaatacttacggttataccgtcacaagaccacaggtttaaactaatactagatccgaaaatcaacgtaacgataggagaacctgccaatataacatgcactgctgtgtcaacgtcattattgatcgacgatgtactgattgaatgggaaaatccatccggatggcttataggattcgattttgatgtatactctgttttaactagtagaggcggtatcaccgaggcgaccttgtactttgaaaatgttactgaagaatatataggtaatacatataaatgtcgtggacacaactattattttgaaaaaacccttacaactacagtagtattggagtaaatatacaatgcatttttatatacattactgaattattattactgaattattattactgaattattattaattatatcgtatttgtgctatagaatggatgaagatacgcgactatctaggtatttgtatctcaccgatagagaacatataaatgtagactctattaaacagttgtgtaaaatatcagatcctaatgcatgttatagatgtggatgtacggctttacatgagtacttttataattatagatcagtcaacggaaaatacaagtatagatacaacggttactatcaatattattcatctagcgattatgaaaattataatgaatattattatgatagaactggtatgaacagtgagagtgataatatatcaatcaaaacagaatatgaattctatgatgaaacacaagatcaaagtacacaactagtaggttacgacattaaactcaaaaccaatgaggatgattttatggctatgatagatcagtgggtgtccatgattatatagatgaatcaattaataaagtagtatatggaagagagtctcacgtaagatggcgggatatatggcaagaacataatgatggcgtatacagtataggaaaggagtgcatagataatatatacgaagacaaccataccgtagacgaattctacaagatagacagcgtatcagatgtagatgacgcggaacacatatctccgataactaaaaaaccatagaatcagttgatgataatacctacatttctaatcttccgtataccatcaaatacaaaatattcgagcaacaataagtattttttatacctttaaaactgataaataaattttttctagtgatattttggcaagatgagaatcctatttctcatcgctttcatgtatgggtgtgttcactcatatgttaacgcggttgaaaccaaatgtccaaatctagacattgtaacatcttctggagaatttcattgttcaggatgtgtggaacatatgcctgagtttagctatatgtattggttggcaaaggatatgaaatcggacgaggataccaagtttatagaacatctgggtgatggcatcaaagaagatgaaaccgttcgtaccacagatagtggaatcgtcactctacgtaaagtccttcatgtgactgatactaataaatttgataattataggttcacttgtgtcctcgctacgctagatggcatttataaaaagaatgtttgctgaagtagttgtgtgctactatttttatttatgatataatctaatggaattaatttgaattgatatttatccaatactaaagattatattagaatcaaattaatcttttatacgagaaaaaataacgacatacgtcgtcaacaaattaaactttttatttattagttaactagcttatagaacttgctcattgttatgtttctaaaacgggtacggcatataggacaattatccgacgcaccggtttctcttcgtgttctatgccatatattgatgcatgttatgcaaaatatatgagtacacgaatccaataaaccaaagtatctatcgttttgagtaaacaacttcatagcaaattccacattctttttctttacttactctatacacgtcctcgtatttatttagtattttgatgatatccaactcagaaatggttgttgtattattgggtgtatttggagtataggtattattagctatgtaccaatttaccaaccctcttaatattgattgataatcacatcggttatccaattaataactaaattgtagtgtatatatagaccatatatgtttctatttttttgacagttacgtatagtttcagtaagttttgattgttgtattcctgtatctctagataagttagtcatatagtcccttccggcgatacgttttttccaagcccgaaattgattagccaaatgtgtatttatttttgtgatattgatataatatttcggataatgcatactgttagtcttatatcatttggttcatctatgtattgtaatattgttacatgatctatagatgatgtattgattttggcaggatcgaattccatatccgcgactaaacagtgaaaaaaatgtaaatactttttaaattttaaattagtaaaacttttttttattttttatgattccaaaaatactgaatacaaagtcctaaattataaatatggagatcatactaccacaacttattattatgtatacaaggccggtgtaatagatagatatatataattctattacaccggcagacaattaccgaccggtatttgtcgttaccaacataccgtataatatgtaatatacaattccataacccattgacagttgttatacatcaaaattgcaattcttttgattacgatgttataagaatgtagttaattgatgtatgatgttaatgtgtcctctttcctcttataacatcgtaatcaaaaacttttttataatatatacctaataatgtgtcttaatagttctcgtgattcgtcaaacaatcattcttataaaatataataaagcaacgtaaaaacacataaaaataagcgtaactaataagacaatggatatttacgacgataaaggtctacagactattaaactgtttaataatgaatttgattgtataaggaatgacatcagagaattatttaaacatgtaactgattccgatagtatacaacttccgatggaagacaattctgatattatagaaaatatcagaaaaatactatatagacgattaaaaaatgtagaatgtgttgacatcgataacacaataacttttatgaaatacgatccaaatgatgataataagcgtacgtgttctaattgggtacccttaactaataactatatggaatattgtctagtaatatatttggaaacaccgatatgtggaggcaaaataaaattataccaccctacaggaaatataaagtcggataaggatattatgtttgcaaagactctagactttaaatcaacgaaagtgttaactggacgtaaaacaattgccgttctagacatatccgtttcatataatagatcaatgactactattcactacaacgacgacgttgatatagatatacatactgataaaaatggaaaagagttatgttattgttatataacaatagatgatcattacttggttgatgtggaaactataggagttatagtcaatagatctggaaaatgtctgttagtaaataaccatctaggtataggtatcgttaaagataaacgtataagcgatagttttggagatgtatgtatggatacaatatttgacttttctgaagcacgagagttattttcattaactaatgatgataacaggaatatagcatgggacactgataaactagacgatgatacagatatatggactcccgtcacagaagatgattacaaatttctttctagactagtattgtatgcaaaatctcaatcggatactgtatttgactattatgttcttactggtgatacggaaccacccactgtattcattttcaaggtaactagattttactttaatatgccgaaataaaaaatttttgtataatatctagaggtagaggtattgtttagataaatacaaataacatagatacatcgcatacttagcatttttataaatatacataagacatacactttatacatttttgtaaaaatactcataaaaaaatttataaaaattatggcacaaccatatcttgtataggtagtttagttcgtcgagtgaacctataaacagataatagacaacacataataatgcctactaatacaagcataataccgggagatgggatatatgacgttgtagtgtttgggttttctgaacgttgatagtctactaatactacatgctgacatctaatgcctgtataaccatgagagcatctacaatacataccgtcaatatctctagcgtggatacagtcaccgtgtaaacaatatccatctccctctggaccgcataatctgatagctggaatatctgttgtagcgtttgtaatttctggcaatgtcgtttcgatagcgttaccactatcggcgaatgatctgattatcatagcagcgaacaacaacatcagataatttatcaacatttttgatggattctgtgtttatgctgtttctcagtgtgtgtttatgacaagattgggaattttatattattaattcagtaatataaactaataatatattgttaattgtgtaaataatataaaaataacaatacaatattgaatgtgttgctgttaaaaatgtatgtgttaatataatagaataaaataaatgagtatgatcattttagataacgattgattttatcattaccgcttcattcttatattctttgcttacggaacctatatttagaaacatctactaacaattttttatgcttgcattattaatggtatgtaatatgattgattgtgtacgcaataccaatttgttaagtatgaatacggggtacaaacataaattgaaatttaacattatttatttatgatatatatcgttatcgttaggtctataccatggatatctttaaagaactaatcttaaaacaccctgatgaaaatgttttgatttctccagtttccattttatctactttatctattctaaatcatggagcagctggttctacagctgaacaactatcaaaatatatagagaatatgaatgagaatacacccgatgacaataatgatgacatggaggtagatattccgtattgtgcgacactagctaccgcaaataaaatatacggtagcgatagtatcgagttccacgcctccttcctacaaaaaataaaagacgattttcaaactgtaaactttaataatgctaaccaaacaaaggaactaatcaacgaatgggttaagacaatgacaaatggtaaaattaattccttattgactagtccgctatccattaatactcgtatgacagttgttagcgccgtccattttaaagcaatgtggaaatatccattttctaaacatcttacatatacagacaagttttatatttctaagaatatagttaccagcgttgatatgatggtgggtaccgagaataacttgcaatatgtacatattaatgaattattcggaggattctctattatcgatattccatacgagggaaactctagtatggtaattatactaccggacgacatagaaggtatatataacatagaaaaaaatataacagatgaaaaatttaaaaaatggtgtggtatgttatctactaaaagtatagacttgtatatgccaaagtttaaagtggaaatgacagaaccgtataatctggtaccgattttagaaaatttaggacttactaatatattcggatattatgcagattttagcaagatgtgtaatgaaactatcactgtagaaaaatttctacatacgacgtttatagatgttaatgaggagtatacagaagcatcggccgttacaggagtatttacgattaacttttcgatggtatatcgtacgaaggtctacataaaccatccattcatgtacatgattaaagacaccacaggacgtatactttttatagggaaatactgctatccgcaataaatataaacaaatagacttttataaagagtcttcaacgataagtatatcgacatactacttatgctgcgaaagattctgaacgagaacgactatctcaccctcttggatcatatccgcactgctaaatactaaatctccactacactttttatcatcttatgaggaatgattgccttcgtgaaataggaataattagcaccagaatagctatggattattgtggtagagagtgcactattctatgtcgtctactggatgaagatgtgacgtacaaaaaaataaaactagaaattgaaacgtgtcacaacttatcaaaacatatagatagacgaggaaacaatgcgctacattgttacgtctccaataaatgcgatacagacattaagattgttctctcgcggagtcgagagactttgtagaaacaacgaaggattaactccgctaggagtatacagtaagcatagatacgtaaaatctcagattgtgcatctactgatatccagctattcaaattcctctaacgaactcaagtcgaatataaatgatttcgatctgtattcggataatatcgacttacgtctgctaaaatacctaattgtggataaacggatacgtccgtccaagaatacgaattatgcaatcaatggtctcggattggtggatatatacgtaacgacgcctaatccgagaccagaagtattgctatggcttcttaaatcagaatgttacagcaccggttacgtatttcgtacctgtatgtacgacagtgatatgtgtaagaactctcttcattactatatatcgtctcatagagaatctcaatctctatccaaggatgtaattaaatgtttgatcgataacaatgtttccatccatggcagagacgaaggaggatctttacccatccaatactactggtctttctcaaccatagatatagagattgttaaattattattaataaaggatgtggacacgtgtagagtatacgacgtcagccctatattagaggcgtattatctaaacaagcgatttagagtaaccccatataatgtagacatggaaatcgttaatcttcttattgagagacgtcatactcttgtcgacgtaatgcgtagtattacttcgtacgattccagagaatataaccactacatcatcgataacattctaaagagatttagacaacaggatgaatccatcgtacaagccatactgataaactacttacattacggcgatatggtcgttcgatgcatgttagataacggacaacaactatcctctacacgactactttgttaataataatctcgtcgatgtaaacgtcgtaaggtttatcgtggaaaatatggacacgcggctgtaaatcacgtatcgaacaatggccgtctatgtatgtacggtctgatattatcgagatttaataattgcgggtatcactgttatgaaaccatactgatagatgtatttgatatactaagcaagtacatggatgatatagatatgatcgataactctactatattacgcggtcgatgtcaataatatacaatttgcaaagcggttattggaatatggagcgagtatcacgctcgataatcaatacggccatccagaaaagcagttacagaagagaaaacaaaacgaaatcgttgttctacaagatgtctctccctacgacgattactacgtaaaaaagatactagcctactgcctattaagggacgagtcattcgcggaactacatagtaaattctgtttaaacgaggactataaaagtgtatttatgaaaaatatatcattcgataagatagattccatcatcgtgacataagtcgcctcaaagagattcgaatctccgacaccgacctgtatacggtatcacagctatcttaaagccatacattcagacagtcacatttcatttcccatgtacgacgatctcatagaacagtgccatctatcgatggagcgtaaaagtaaactcgtcgacaaagcactcaataaattagagtctaccatcggtcaatctagactatcgtatttgcctccggaaattatgcgcaatatcatctaaacagtatgttgtacggaaagaaccattacaaatattatccatgatagaaagaaaatatctatatgattggagaagtaggaaacaggaacaagacaacgattactacattattaaatcatgaagtccgtattatactcgtatatattgtttctctcatgtataataataaacggaagagatatagcaccgcatgcaccatccgatggaaagtgtaaagacaacgaatacaaacgccataatttgtgtccgggaacatacgcttccagattatgcgatagcaagactaacacacgatgtacgccgtgtggttcgggtaccttcacatctcgcaataatcatttacccgcttgtctaagttgtaacggaagacgcgatcgtgtaacacgactcacaatagaatctgtgaatgctctcccggatattattgtcttctcaaaggatcatccggatgcaaggcatgtgtttcccaaacaaaatgtggaataggatacggagtatccggagacgtcatctgttctccgtgtggtctcggaacatattctcacaccgtctcttccgcagataaatgcgaacccgtacccagaaatacgtttaactatatcgatgtggaaattaacctgtatccagttaacgacacgtcgtgtactcggacgaccactaccggtctcagcgaatccatctcaacgtcggaactaactattactatgaatcataaagactgtaatcccgtatttcgtgatggatacttctccgttcttaataaggtagcgacttcaggtttctttacaggagaaaggtgtgcactctgaatttcgagattaaatgcaataacaaagattcttcctccaaacagttaacgaaagcaaagaatgatactatcatgccgcattcggagacagtaactctagtgggcgacatctatatactatatagtaataccaatactcaagactacgaaactgatacaatctcttatcatgtgggtaatgttctcgatgtcgatagccatatgcccggtagttgcgatatacataaactgatcactaattccaaacccacccactttttatagtaagtttttcacccataaataataaatacaataattaatttctcgtaaaagtagaaaatatattctaatttattgcacggtaaggaagtagaatcataaagaacagtactcaatcaatagcaattatgaaacaatatatcgtcctggcatgcatgtgcctggcggcagctgctatgcctgccagtcttcagcaatcatcctcatcctcctcctcgtgtacggaagaagaaaacaaacatcatatgggaatcgatgttattatcaaagtcacaaagcaagaccaaacaccgaccaatgataagatttgccaatccgtaacggaaattacagagtccgagtcagatccagatcccgaggtggaatcagaagatgattccacatcagtcgaggatgtagatcctcctaccacttattactccatcatcggtggaggtctgagaatgaactttggattcaccaaatgtcctcagattaaatccatctcagaatccgctgatggaaacacagtgaatgctagattgtccagcgtgtccccaggacaaggtaaggactctcccgcgatcactcatgaagaagctcttgctatgatcaaagactgtgaagtgtctatcgacatcagatgtagcgaagaagagaaagacagcgacatcaagacccatccagtactcgggtctaacatctctcataagaaagtgagttacgaagatatcatcggttcaacgatcgtcgatacaaaatgcgtcaagaatctagagtttagcgttcgtatcggagacatgtgcaaggaatcatctgaacttgaggtcaaggatggattcaagtatgtcgacggatcggcatctgaaggtgcaaccgatgatacttcactcatcgattcaacaaaactcaaagcgtgtgtctgaatcgataactctattcatctgaaattggatgagtagggttaatcgaacgattcaggcacaccacgaattaaaaaagtgtaccggacactatattccggtttgcaaaacaaaaatgttcttaactacattcacaaaaagttacctctcgcgacttcttctttttctgtctcaatagtgtgatacgattatgacactattcctattcctattcctatttcctttcagagtatcacaaaaatattaaacctctttctgatggtctcataaaaaaagttttacaaaaatatttttattctctttctctctttgatggtctcataaaaaaagttttacaaaaatatttttattctctttctctctttgatggtctcataaaaaaagttttacaaaaatatttttattctctttctctctttgatggtctcataaaaaaagttttacaaaaatatttttattctctttctctctttgatggtctcataaaaaaagttttacaaaaatatttttattctctttctctctttgatggtctcataaaaaaagttttacaaaaatatttttattctctttctctctttgatggtctcataaaaaaagttttacaaaaatatttttattctctttctctctttgatggtctcataaaaaaagttttacaaaaatatttttattctctttctctctttgatggtctcataaaaaaagttttacaaaaatatttttattctctttctctctttgatggtctcataaaaaaagttttacaaaaatatttttattctctttctctctttgatggtctcataaaaaaagttttacaaaaatatttttattctctttctctctttgatggtctcataaaaaaagttttacaaaaatatttttattctctttctctctttgatggtctcataaaaaagttttacaaaaatatttttattctctttctctctttgatggtctcataaaaaagttttacaaaaatatttttattctctttctctctttgatggtctcataaaaaaagttttacaaaaatatttttattctctttctctctttgatggtctcataa

SEQ ID NO: 19 - DNA, 184241 bp, Artificial Sequence
  Vaccinia virus GLV-1b372 genome
tttttttatgagaccatcaaagagagaaagagaataaaaatatttttgtaaaactttttttatgagaccatcaaagagagaaagagaataaaaatatttttgtaaaactttttttatgagaccatcaaagagagaaagagaataaaaatatttttgtaaaactttttttatgagaccatcaaagagagaaagagaataaaaatatttttgtaaaactttttttatgagaccatcaaagagagaaagagaataaaaatatttttgtaaaactttttttatgagaccatcaaagagagaaagagaataaaaatatttttgtaaaactttttttatgagaccatcaaagagagaaagagaataaaaatatttttgtaaaactttttttatgagaccatcaaagagagaaagagaataaaaatatttttgtaaaactttttttatgagaccatcaaagagagaaagagaataaaaatatttttgtaaaactttttttatgagaccatcaaagagagaaagagaataaaaatatttttgtaaaactttttttatgagaccatcagaaagaggtttaatatttttgtgatactctgaaaggaaataggaataggaataggaatagtgtcataatcgtatcacactattgagacagaaaaagaagaagtcgcgagaggtaactttttgtgaatgtagttaagaacatttttgttttgcaaaccggaatatagtgtccggtacacttttttaattcgtggtgtgcctgaatcgttcgattaaccctactcatccaatttcagatgaatagagttatcgattcagacacacgctttgagttttgttgaatcgatgagtgaagtatcatcggttgcaccttcagatgccgatccgtcgacatacttgaatccatccttgacctcaagttcagatgattccttgcacatgtctccgatacgaacgctaaactctagattcttgacacattttgtatcgacgatcgttgaaccgatgatatcttcgtaactcactttcttatgagagatgttagacccgagtactggatgtcgctgtctttctcttcttcgctacatctgatgtcgatagacacctcacagtctttgatcatagcaagagcttcttcatgagtccttaccttgtcctggggacacgctggacaatctagcattcactgtgtttccatcagcggattctgagatggatttaatctgaggacatttggtgaatccaaagttcattctcagacctccaccgatgatggagtaataagtggtaggaggatctacatcctcgactgatgtggaatcatcttctgattccacctcgggatctggatctgactcggactctgtaatttccgttacggattggcaaatcttatcattggtcggtgtttggtcttgctttgtgactttgataataacatcgattcccatatgatgtttgttttcttcttccgtacacgaggaggaggatgaggatgattgctgaagactggcaggcatagcagctgccgccaggcacatgcatgccaggacgatatattgtttcataattgctattgattgagtactgttctttatgattctacttccttaccgtgcaataaattagaatatattttctacttttacgagaaattaattattgtatttattatttatgggtgaaaaacttactataaaaagtgggtgggtttggaattagtgatcagtttatgtatatcgcaactaccgggcatatggctatcgacatcgagaacattacccacatgataagagattgtatcagtttcgtagtcttgagtattggtattactatatagtatatagatgtcgcccactagagttactgtctccgaatgcggcatgatagtatcattctttgctttcgttaactgtttggaggaagaatctttgttattgcatttaatctcgaaattcagagtgcacacctttctcctgtaaagaaacctgaagtcgctaccttattaagaacggagaagtatccatcacgaaagacgggattacagtctttatgattcatagtaatagttagttccgacgttgagatggattcgctgagaccggtagtggtcgtccgagtacacgacgtgtcgttgacgggatacaggttaatttccacatcgatatagttaaaggtatttctgggtacgggttcgcatttatctgcggaagagacggtgtgagaatatgttccgagaccacacggagaacagatgacgtctccggatactccgtatcctattccacattttgtttgggaaacacatgccttgcatccggatgatcctttgagaagacaataatatccgggagagcattcacagattctattgtgagtcgtgttacacgatcgcgtcttccgttacaacttagacaagcgggtaaatgattattgcgagatgtgaaggtacccgaaccacacggcgtacattgtgtgttagtcttgctatcgcataatctggaagcgtatgttcccggacacaaattatggcgtttgtattcgttgtctttacactttccatcggatggtgcatgcggtgctatatctcttccgtttattattatacatgagagaaacaatatatacgagtataatacggacttcatgatttaataatgtagtaatcgtcgtcttgttcctgtttcctacttctccaatcatatagatattttctttctatcatggataatatttgtaatggttctttccgtacaacatactgtttagatgatattgcgcataatttccggaggcaaatacgatagtctagattgaccgatggtagactctaatttattgagtgctttgtcgacgagtttacttttacgctccatcgatagatggcactgttctatgagatcgtcgtacatgggaaatgaaatgtgtctgtctgaatgtatggctttaagatagctgtgataccgtatacaggtcggtgtcggagattcgaatctctttaaggcgacttatgtcacgatgatggaatctatcttatcgaatgatatatttttcataaatacacttttatagtcctcgtttaaacagaatttactatgtagttccgcgaatgactcgtcccttaataggcagtaggctagtatcttttttacgtagtaatcgtcgtagggagagacatcttgtagaacaacgatttaatcataggtagagatactttcagtctgtggtggatgatgtcattcacaacatccgccttgtatatgatgtttctgttttcaaacaccaagtcgaataccgtctttagtcggaaggttgatgtcgtatccgatgtatgaggcaacattgttgttacaattttgaaaggcggtattatagtattcgtctttctgaatgtcgaacctatctaatagataccgtagtatattgagagtgtatccttgattatgttttatgaatagataaagtagatgttgtccttcttccttttgttcgtgccaattgagtaacattatgagaatatgacctgttgcacaatcgttccatgatgggtgtacaatcaagattattacgtatcctcgtatcggctcctcgagataaaagagcatacaccacacgaggactatgtttggtatactgttgaaggtaagtgtgtaaccgcgttaatgtttgctccataatctattatcgcgtagatgaatcgcttctcggctcgcatcttagtgtgacttaacttgtaataattgctttcgtagaacgtggatatgtgtttacagtagtaatgaagagaagtgagttcatcctcgtcggcgcaattagggtcggatcctttgtacagaacgtaatagtttaagctcccattgaatttatatctaagataacacagcaatagatcggatgatttactaaagtcatcaatggtgtccgttagtatatcaaagatcttgttatcgattgatagtggtcatccttgctatcaaagttacgcatgccgtggtgtaacaatatctttaatacagatggattaaatcgtgtattcatcgtatagcaatgtaatggagagttacctcgtttattcagatcgcagtgtttaataactagcttaaacagatgagacgatgtatccacatcaaagaacgtaaaatacatatgacagacattgttgacagaaacgtgaccttcattcttaccgtcgtccataaatacgttaggtatgtaccacatactgtcgcgaacgatgcgtacaatctcgtccatctcataatgatttactttttcataattaaagatgtgaaagaaaaccgaacaatatatttttttagtaatgtttatgcgagacatataaaataaactccgtgtttatgatgccggtaaatgtttttatcatcttggacggaatcgattttgtaatatgtcatggaaacaaatgaaacaggacattatcgctccatgataaattatttaatggagtaataaagtatctccatgggtaatttcgaaatcaagttatcgtctgtattaatgttgtccactatggagtcgatcctctcattgttctttacagtttctgtaatgatggacgttagttcttttttgtaccatttgatgtcggattctttgcgtatctcaatttgtggcgtttgcttcgtttaaataatatatcaaacatggagacgcctgatatgtagacattcttcattctattaatgtctactctatagcgctttagttccttatgacgaccggcgatatcatactttactttagaaggaaaatcatcatctaggattaaggcgtatctgatacaggcgaataatggttcaggatatagatagcgtatatctctattaaatgcgtcaatcatagtctctagagtgggatggtaactcagtaataaatcaactagcttcgttttgttttctctttggtaactgcttttctggatggccgtattgattatcgagcgtgacactcgctccatattccaataaccgctttgcaaattgtatattattgacatcgaccgcgtaatatagtagagttatcgatcatatctatatcatccatgtacttgcttagtatatcaaatacatctatcagtatggtttcataacagtgatacccgcaattattaaatctcgataatatcagaccgtacatacatagacggccattgttcgatacgtgatttacagccgcgtgtccatattttccacgataaaccttacgacgtttacatcgacgagattattattaacaaagtagtcgtgcagaggatagttgttgtccgttatctaacatgcatcgaacgaccatatcgccgtaatgtaagtagtttatcaacatggcttgtacatcctgttgtctaaatctctttagaatgttatcgatgatgtagtggttatattctctggaatcgtacgaagtaatactacgcattacgtcgacaagagtatgacgtctctcaataagaagattaacgatttccatgtctacattatatggggttactctaaatcgcttgtttagataatatagggctgacgtcgtatactctacacgtgtccacatcctttattaataataatttaacaatctctatatctatggttgagaaagaccagtagtattggatgggtaaagatcctccttcgtctctgccatggatggaaacattgttatcgatcaaacatttaattacatccttggatagagattgagattctctatgagacgatatatagtaatgaagagagttcttacacatatcactgtcgtacatacaggtacgaaatacgtaaccggtgctgtaacattctgatttaagaagccatagcaatacttctggtctcggattaggcgtcgttacgtatatatccaccaatccgagaccattgattgcataattcgtattcttggacggacgtatccgtttatccacaattaggtattttagcagacgtaagtcgatattatccgaatacagatcgaaatcatttatattcgacttgagttcgttagaggaatttgaatagctggatatcagtagatgcacaatctgagattttacgtatctatgcttactgtatactcctagcggagttaatccttcgttgtttctacaaagtctctcgactccgcgagagaacaatcttaatgtctgtatcgcatttattggagacgtaacaatgtagcgcattgtttcctcgtctatctatatgttttgataagttgtgacacgtttcaatttctagttttatttttttgtacgtcacatcttcatccagtagacgacatagaatagtgcactctctaccacaataatccatagctattctggtgctaattattcctatttcacgaaggcaatcattcctcataagatgataaaaagtgtagtggagatttagtatttagcagtgcggatatgatccaagagggtgagatagtcgttctcgttcagaatctttcgcagcataagtagtatgtcgatatacttatcgttgaagactctttataaaagtctatttgtttatatttattgcggatagcagtatttccctataaaaagtatacgtcctgtggtgtctttaatcatgtacatgaatggatggtttatgtagaccttcgtacgatataccatcgaaaagttaatcgtaaatactcctgtaacggccgatgcttctgtatactcctcattaacatctataaacgtcgtatgtagaaatttttctacagtgatagtttcattacacatcttgctaaaatctgcataatatccgaatatattagtaagtcctaaattttctaaaatcggtaccagattatacggttctgtcatttccactttaaactttggcatatacaagtctatacttttagtagataacataccacaccattttttaaatttttcatctgttatatttttttctatgttatatataccttctatgtcgtccggtagtataattaccatactagagtttccctcgtatggaatatcgataatagagaatcctccgaataattcattaatatgtacatattgcaagttattctcggtacccaccatcatatcaacgctggtaactatattcttagaaatataaaacttgtctgtatatgtaagatgtttagaaaatggatatttccacattgctttaaaatggacggcgctaacaactgtcatacgagtattaatggatagcggactagtcaataaggaattaattttaccatttgtcattgtcttaacccattcgttgattagttcctttgtttggttagcattattaaagtttacagtttgaaaatcgtcttttattttttgtaggaaggaggcgtggaactcgatactatcgctaccgtatattttatttgcggtagctagtgtcgcacaatacggaatatctacctccatgtcatcattattgtcatcgggtgtattctcattcatattctctatatattttgatagttgttcagctgtagaaccagctgctccatgatttagaatagataaagtagataaaatagaaactggagaaatcaaaacattttcatccgtgtgttttaagattagttctttaaagatatccatggtatagaccaaacaataacgataacgatatatatcataaataaataatgttaaatttcagtttatgtttgtaccccgtattcatacttaacaaattggtattgcgtacacaatcaatcatattacataccattaataatgcaagcataaaaaattgttagtagatgtttctaaatataggttccgtaagcaaagaatataagaatgaagcggtaatgataaaatcaatcgttatctaaaatgatcatactcatttattttattctattatattaacacatacatttttaacagcaacacattcaatattgtattgttatttttatattatttacacaattaacaatatattattagtttatattactgaattaataatataaaattcccaatcttgtcataaacacacactgagaaacagcataaacacagaatccatcaaaaatgttgataaattatctgatgttgttgttcgctgctatgataatcagatcattcgccgatagtggtaacgctatcgaaacgacattgccagaaattacaaacgctacaacagatattccagctatcagattatgcggtccagagggagatggatattgtttacacggtgactgtatccacgctagagatattgacggtatgtattgtagatgctctcatggttatacaggcattagatgtcagcatgtagtattagtagactatcaacgttcagaaaacccaaacactacaacgtcatatatcccatctcccggtattatgcttgtattagtaggcattattatgtgttgtctattatctgtttataggttcactcgacgaactaaactacctatacaagatatggttgtgccataatttttataaatttttttatgagtatttttacaaaaatgtataaagtgtatgtcttatgtatatttataaaaatgctaagtatgcgatgtatctatgttatttgtatttatctaaacaatacctctacctctagatattatacaaaaattttttatttcggcatattaaagtaaaatctagttaccttgaaaatgaatacagtgggtggttccgtatcaccagtaagaacataatagtcaaatacagtatccgattgagattttgcatacaatactagtctagaaagaaatttgtaatcatcttctgtgacgggagtccatatatctgtatcatcgtctagtttatcagtgtcccatgctatattcctgttatcatcattagttaatgaaaataactctcgtgcttcagaaaagtcaaatattgtatccatacatacatctccaaaactatcgcttatacgtttatctttaacgatacctatacctagatggttatttactaacagacattttccagatctattgactataactcctatagtttccacatcaaccaagtaatgatcatctattgttatataacaataacataactcttttccatttttatcagtatgtatatctatatcaacgtcgtcgttgtagtgaatagtagtcattgatctattatatgaaacggatatgtctagaacggcaattgttttacgtccagttaacactttcgttgatttaaagtctagagtctttgcaaacataatatccttatccgactttatatttcctgtagggtggtataattttattttgcctccacatatcggtgtttccaaatatattactagacaatattccatatagttattagttaagggtacccaattagaacacgtacgcttattatcatcatttggatcgtatttcataaaagttattgtgttatcgatgtcaacacattctacattttttaatcgtctatatagtatttttctgatattttctataatatcagaattgtcttccatcggaagttgtatactatcggaatcagttacatgtttaaataattctctgatgtcattccttatacaatcaaattcattattaaacagtttaatagtctgtagacctttatcgtcgtaaatatccattgtcttattagttacgcttatttttatgtgtttttacgttgctttattatattttataagaatgattgtttgacgaatcacgagaactattaagacacattattaggtatatattataaaaaagtttttgattacgatgttataagaggaaagaggacacattaacatcatacatcaattaactacattcttataacatcgtaatcaaaagaattgcaattttgatgtataacaactgtcaatgggttatggaattgtatattacatattatacggtatgttggtaacgacaaataccggtcggtaattgtctgccggtgtaatagaattatatatatctatctattacaccggccttgtatacataataataagttgtggtagtatgatctccatatttataatttaggactttgtattcagtatttttggaatcataaaaaataaaaaaaagttttactaatttaaaatttaaaaagtatttacatttttttcactgtttagtcgcggatatggaattcgatcctgccaaaatcaatacatcatctatagatcatgtaacaatattacaatacatagatgaaccaaatgatataagactaacagtatgcattatccgaaatattatatcaatatcacaaaaataaatacacatttggctaatcaatttcgggcttggaaaaaacgtatcgccggaagggactatatgactaacttatctagagatacaggaatacaacaatcaaaacttactgaaactatacgtaactgtcaaaaaaatagaaacatatatggtctatatatacactacaatttagttattaattggataaccgatgtgattatcaatcaatattaagagggttggtaaattggtacatagctaataatacctatactccaaatacacccaataatacaacaaccatttctgagttggatatcatcaaaatactggataaatacgaggacgtgtatagagtaagtaaagaaaaagaatgtggaatttgctatgaagttgtttactcaaaacgatagatactttggtttattggattcgtgtactcatatattttgcataacatgcatcaatatatggcatagaacacgaagagaaaccggtgcgtcggataattgtcctatatgccgtacccgttttagaaacataacaatgagcaagttctataagctagttaactaataaataaaaagtttaatttgttgacgacgtatgtcgttattttttctcgtataaaagattaatttgattctaatataatctttagtattggataaatatcaattcaaattaattccattagattatatcataaataaaaatagtagcacgcactacttcagccaaatattcttttttgaaacgccatctatcgtagtgaggacacaagtgaacctataattatcaaatttattagtatcggttacatgaaggactttacgtagagtgacgattccactatctgtggtacgaacggtttcatcttctttgatgccatcacccagatgttctataaacttggtatcctcgtccgatctcatatcctttgccaaccaatacatgtagctaaaattaggcataaatttcacacatcctgaacaatgaaattctccagaagatgttacaatgtctagatttggacatttggtttcaaccgcgttaacatatgagtgaacacacccatacatgaaagcgatgagaaataggattctcatcttgccaaaatatcactagaaaaaatttatttatcagttttaaaggtataaaaaatacttattgttgctcgaatattttgtatttgatggtatacggaagattagaaatgtaggtattatcatcaactgattctatggttttatgtattctatcatgtttcactattgcgttggaaataatatcatatgcttccacatatattttattttgttttaactcataatactcacgtaattctggattattggcatatctatgaataattttagctccatgatcagtaaatattaatgagaacatagtattaccacctaccattatttttttcatctcattcaattcttaattgcaaagatctatataatcattatagcgttgacttatggactctggaatcttagacgatgtacagtcatctataatcatggcatatttaatacattgttttatagcatagtcgttatctacgatgttagatatttctctcaatgaatcaatcacacaatctaatgtaggtttatgacataatagcattttcagcagttcaatgtttttagattcgttgatggcaatggctatacatgtatatccgttatttgatctaatgttgacatctgaaccggattctagcagtaaagatactagagattgtttattatatctaacagccttgtgaagaagtgtttctcctcgtttgtcaatcatgttaatgtctttaagataaggtaggcaaatgtttatagtactaagaattgggcaagcataagacatgtcacaaagacccttttttgtatgtataagtgtaaaaattataacatccatagttggatttacataggtgtccaatcgggatctctccatcatcgagataattgatggcatctcccttccttttttagtagatatttcatcgtgtaagaatcaatattaatatttctaaagtatccgtgtatagcctctttatttaccacagctccatattccactagagggatatcgccgaatgtcatatactcaattagtatatgttggaggacatccgagttcattgttttcaatatcaaagagatggtttccttatcatttctccatagtggtacaatactacacattattccgtgcggctttccattttccaaaaacaatttgaccaaatctaaatctacatctttattgtatctataatcactatttagataatcagccataattcctcgagtgcaacatgttagatcgtctatatatgaataagcagtgttatctattcctttcattaacaatttaacgatgtctatatctatatgagatgacttaatataatattgaagagctgtacaatagtttttatctataaaagacggcttgattccgtgattaattagacatttaacaacttccggacgcacatatgctctcgtatccgactttgaatacagatgagagatgatatacagatgcaatacggtaccgcaatttcgtagttgataatcatcatacgcgtatcagtactcgtcctcataaagaacactgcagccattttctatgaacaaatcaataattttagaaacaggatcattgtcattacataattttctataactgaacgatggttttcacatttaacactcaagtcaaatccatgttctaccaacacctttatcaagtcaacgtctacatttttggatttcatatagctgaatatattaaagttatttatgttgctaaatccagtggcttctagtagagccatcgctatatccttattaactttaacatgtctactatttgtgtattcttctaatggggtaagctgtctccaatttttgcgtaatggattagtgccactgtctagtagtagtttgacgacctcgacattattacaatgctcattaaaaaggtatgcgtgtaaagcattattcttgaattggttcctggtatcattaggatctctgtctttcaacatctgtttaagttcatcaagagccacctcctcattttccaaatagtcaaacattttgactgaatgagctactgtgaactctatacacccacacaactaatgtcattaaatatcatgtcaaaaacttgtacaattattaataaaaataatttagtgtttaaattttaccagttccagattttacacctccgttaatacctccattaaccccactggacgatcctcctccccacattccaccgccaccagatgtataagttttagatcctttattactaccatcatgtccatggataaagacactccacatgccgccactaccccctttagaagacatattaataagacttaaggacaagtttaacaataaaattaatcacgagtaccctactaccaacctacactattatatgattatagtttctatttttacagtaccttgactaaagtttctagtcacaagagcaatactaccaacctacactattatatgattatagtttctatttttataggaacgcgtacgagaaaatcaaatgtctaatttctaacggtagtgttgataaacgattgttatccgcggatacctcctctatcatgtcgtctattttcttactttgttctattaacttattagcattatatattatttgattataaaacttatattgcttattagcccaatctgtaaatatcggattattaacatatcgtttctttgtaggtttatttaacatgtacatcactgtaagcatgtccttaccatttattttaatttgacgcatatccgcaatttctttttcgcagtcggttataaattctatatatgatggatacatgctacatgtgtacttataatcgactaatatgaagtacttgatacatattttcagtaacgatttattattaccacctatgaataagtacctgtgatcgtctaggtaatcaactgttttcttaatacattcgatggttggtaatttactcagaataatttccaatatcttaatatataattctgctatttctgggatatatttatctgccagtataacacaaatagtaatacatgtaaacccatattttgttattatattaatgtctgcgccattatctattaaccattctactaggctgacactatgcgactcaatacaatgataaagtatactacatccatgtttatctattttgtttatatcatcaatatacggcttacaaagttttagtatcgataacacatccaactcacgcatagagaaggtagggaataatggcataatatttattaggttatcatcattgtcattatctacaactaagtttccattttttaaaatatactcgacaactttaggatctctattgccaaatttttgaaaatatttatttatatgcttaaatctatataatgtagctccttcatcaatcatacatttaataacattgatgtatactgtatgataagatacatattctaacaatagatcttgtatagaatctgtatatcttttaagaattgtggatattaggatattattacataaactattacacaattctaaaatataaaacgtatcacggtcgaataatagttgatcaactatataattatcgattttgtgatttttcttcctaaactgtttacgtaaatagttagatagaatattcattagttcatgaccactatagttactatcgaataacgcgtcaaatatttcccgtttaatatcgcatttgtcaagataataatagagtgtggtatgttcacgataagtataataacgcatctctttttcgtgtgaaattaaatagtttattacgtccaaagatgtagcataaccatcttgtgacctagtaataatataataatagagaactgttttacccattctatcatcataatcagtggtgtagtcgtaatcgtaatcgtctaattcatcatcccaattataatattcaccagcacgtctaatctgttctattttgatcttgtatccatactgtatgttgctacatgtaggtattcctttatccaataatagtttaaacacatctacattgggatttgatgttgtagcgtatttttctacaatattaataccatttttgatactatttatttctatacctttcgaaattagtaatttcaataagtctatattgatgttatcagaacatagatattcgaatatatcaaaatcattgatatttttatagtcgactgacgacaataacaaaatcacaacatcgtttttgatattattatttttcttggtaacgtatgcctttaatggagtttcaccatcatactcatataatggatttgcaccactttctatcaatgattgtgcactgctggcatcgatgttaaatgttttacaactatcatagagtatcttatcgttaaccatgattggttgttgatgctatcgcattttttggtttctttcatttcagttatgtatggatttagcacgtttgggaagcatgagctcatatgatttcagtactgtagtgtcagtactattagtttcaataagatcaatctctagatctatagaatcaaaacacgataggtcagaagataatgaatatctgtacgcttcttgttgtactgtaacttctggttttgttagatggttgcatcgtgctttaacgtcaatggtacaaattttatcctcgctttgtgtatcatattcgtccctactataaaattctatattcagattatcatgcgatgtgtatacgctaacggtatcaataaacggagcacaccatttagtcataaccgtaatccaaaaatttttaaagtatatcttaacgaaagaagttgtatcattgtctacggtgtatggtactagatcctcataagtgtatatatctagagtaatgtttaatttattaaatggttgataatatggatcgtcgtggcaatttcctaagatggaaatgagatatagacacgcaataaatctaatcgaagacatggttactccttaaaaaaatacgaataatcaccttggctatttagtaagtgtcatttaacactatactcatattaatccatggactcataatctctatacgggattaacggatgttctatatacggggatgagtagttctcttctttaactttatactttttactaatcatatttagactgatgtatgggtaatagtgtttgaagagctcgttctcatcatcagaataaatcaatatctctgtttttttgttatacagatgtattacagcctcatatattacgtaatagaacgtgtcatctaccttattaactttcaccgcatagttgtttgcaaatacggttaatcctttgacctcgttgatttccgaccaatctgggcgtataatgaatctaaactttaatttcttgtaatcattcgaaataatttttagtttgcatccgtagttatcccctttatgtaactgtaaatttctcaacgcgatatctccattaataatgatgtcgaattcgtgctgtatacccatactgaatggatgaacgaataccgacggcgttaatagtaatttactttttcatctttacatattgggtactagttttactatcataagtttataaattccacaagctactatggaataagccaaccatcttagtataccacacatgtcttaaagtttattaattaattacatgttgttttatatatatcgctacgaatttaaacagagaaatcagtttaggaaaaaaaaaattatctatctacatcatcacgtctctgtattctacgatagagtgctactttaagatgagacatatccgtgtcatcaaaaatatactccattaaaatgattattccggcagcgaacttgatattggatatatcacaacctttgttaatatctacgacaatagacagcagtcccatggttccataaacagtgagtttatctttctttgaagagatattttgtagagatcttataaaactgtcgaatgacatcgcatttatatctttagctaaatcgtatatgttaccatcgtaatatctaaccgcgtctatcttaaacgtttccatcgctttaaagacgtttccgatagatggtctcatttcatcagtcatactgagccaacaaatataatcgtgtataacatctttgatagaatcagactctaaagaaaacgaatcggctttattatacgcattcatgataaacttaatgaaaaatgtttttcgttgtttaagttggatgaatagtatgtcttaataattgttattatttcattaattaatatttagtaacgagtacactctataaaaacgagaatgacataactaatcataactagttatcaaagtgtctaggacgcgtaattttcatatggtatagatcctgtaagcattgtctgtattctggagctattttctctatcgcattagtgagttcagaatatgttataaatttaaatcgaataacgaacataactttagtaaagtcgtctatattaactcttttattttctagccatcgtaataccatgtttaagatagtatattctctagttactacgatctcatcgttgtctagaatatcacatactgaatctacatccaattttagaaattggtctgtgttacatatctcttctatattattgttgatgtattgtcgtagaaaactattacgtagaccattttctttataaaacgaatatatagtactccaattatctttaccgatatatttgcacacataatccattctctcaatcactacatctttaagattttcgttgttaagatatttggctaaactatataattctattagatcatcaacagaatcagtatatatttttctagatccaaagacgaactctttggcgtcctctataatattcccagaaaagatattttcgtgttttagtttatcgagatctgatctgttcatatacgccatgattgtacggtacgttatgataaccgcataaaataaaaatccattttcatttttaaccaatactattcataattgagattgatgtaatactttgttactttgaacgtaaagacagtacacggatccgtatctccaacaagcacgtagtaatcaaatttggtgttgttaaacttcgcaatattcatcaatttagatagaaacttatactcatcatctgttttaggaatccatgtattattaccactttccaacttatcattatcccaggctatgtttcgtccatcatcgttgcgcagagtgaataattcttttgtattcggtagttcaaatatatgatccatgcatagatcggcaaagctattgtagatgtgatttttcctaaatctaatataaaactcgtttactagcaaacactttcctgatttatcgaccaagacacatatggtttctaaatctatcaagtggtggggatccatagttatgacgcagtaacatatattattacattcttgactgtcgctaatatctaaatatttattgttatcgtattggattctgcatatagatggcttgtatgtcaaagatatagaacacataaccaatttatagtcgcgctttacattctcgaatctaaagttaagagatttagaaaacattatatcctcggatgatgttatcactgtttctggagtaggatatattaaagtctttacagatttcgtccgattcaaataaatcactaaataatatcccacattatcatctgttagagtagtatcattaaatctattatattttatgaaagatatatcactgctcacctctatatttcgtacatttttaaactgtttgtataatatctctctgatacaatcagatatatctattgtgtcggtagacgataccgttacatttgaattaatggtgttccattttacaacttttaacaagttgaccaattcatttctaatagtatcaaactctccatgattaaatattttaatagtatccattttatatcactacggacacaaagtagctgacataaaccattgtataatttttatgttttatgtttattagcgtacacattttggaagttccggcttccatgtatttcctggagagcaagtagatgatgaggaaccagatagtttatatccgtacttgcacttaaagtctacattgtcgttgtatgagtatgatcttttaaacccgctagacaagtatccgtttgatattgtaggatgtggacatttaacaatctgacacgtgggtggatcggaccattctcctcctgaacacaggacactagagttaccaatcaacgaatatccactattgcaactataagttacaacgctcccatcggtataaaaatcctcgtatccgttatgtcttccgttggatatagatggaggggattggcatttaacagattcacaaataggtgcctcgggattccataccatagatccagtagatcctaattcacaatacgatttagattcaccgatcaactgatatccgctattacaagagtacgttatactagagccaaagtctactccaccaatatcaagttggccattatcgatatctcgaggcgatgggcatctccgtttaatacattgattaaagagtgtccatccagtacctgtacatttagcatatataggtcccattttttgctttctgtatccaggtagacatagatattctatagtgtctcctatgttgtaattagcattagcatcagtctccacactattcttaaatttcatattaatgggtcgtgacggaatagtacagcatgatagaacgcatcctattcccaacaatgtcaggaacgtcacgctctccaccttcatatttatttatccgtaaaaatgttatcctggacatcgtacaaataataaaaagcccatatatgttcgctattgtagaaattgtttttcacagttgctcaaaaacgatggcagtgacttatgagttacgttacactttggagtctcatctttagtaaacatatcataatattcgatattacgagttgacatatcgaacaaattccaagtatttgattttggataatattcgtattttgcatctgctataattaagatataatcaccgcaagaacacacgaacatctttcctacatggttaaagtacatgtacaattctatccatttgtcttccttaactatatatttgtatagataattacgagtctcgtgagtaattccagtaattacatagatgtcgccgtcgtactctacagcataaactatactatgatgtctaggcatgggagacttttttatccaacgatttttagtgaaacattccacatcgtttaatactacatatttctcatacgtggtataaactccacccattacatatatatcatcgtttacgaataccgacgcgcctgaatatctaggagtaattaagtttggaagtcttatccatttcgaagtgccgtgtttcaaatattctgccacacccgttgaaatagaaaattctaatcctcctattacatataactttccatcgttaacacaagtactaacttctgattttaacgacgacatattagtaaccgttttccattttttcgttttaagatctacccgcgatacggaataaacatgtctattgttaatcatgccgccaataatgtatagacaattatgtaaaacatttgcattatagaattgtctatctgtattaccgactatcgtccaatattctgttctaggagagtaatgggttattgtggatatataatcagagtttttaatgactactatattatgttttataccatttcgtgtcactggctttgtagatttggatatagttaatcccaacaatgatatagcattgcgcatagtattagtcataaacttgggatgtaaaatgttgatgatatctacatcgtttggatttttatgtatccactttaataatatcatagctgtaacatcctcatgatttacgttaacgtcttcgtgggataagatagttgtcagttcatcctttgataattttccaaattctggatcggatgtcaccgcagtaatattgttgattatttctgacatcgacgcattatatagttttttaattccatatcttttagaaaagttaaacatccttatacaatttgtgaaattaatattatgaatcatagtttttacacatagatctactacaggcggaacatcaattattatggcagcaactagtatcatttctacattgtttatggtgatgtttatcttcttccagcgcatatagtctaatagcgattcaaacgcgtgatagtttataccattcaatataatcgcttcatcctttagatggtgatcctgaatgcgtttaaaaaaattatacggagacgccgtaataatttccttattcacttgtataatttccccattgatagaaaatattacgctttccattcttaaagtactataagtaattatagtataatgtaaacgtttatatattcaatatttttataaaaatcattttgacattaattcctttttaaatttccgtctatcatctatagaaacgtattctatgaatttataaaatgcttttacgtgtcctatcgtaggcgatagaaccgctaaaaagcctatcgaatttctacaaaagaatctgttatatggtatagggagagtataaaacattaaatgtccgtacttattaaagtattcagtagccaatcctaactctttcgaatacttattaatggctcttgttctgtacgaatctatttttttgaacaacggacctagtggtatatcttgttctatgtatctaaaataatgtctgactagatccgttagtttaatatccgcagtcatcttgtctagaatggcaaatctaactgcgggtttaggctttagtttagtttctatatctacatctatgtctttatctaacaccaaaaatataatagctaatattttattacaatcatccggatattcttctacgatctcactaactaatgtttctttggttatactagtatagtcactatcggacaaataaagaaaatcagatgatcgatgaataatacatttaaattcatcatctgtaagatttttgagatgtctcattagaatattattagggttagtactcattatcattcggcagctattacttattttattatttttcaccatatagatcaatcattagatcatcaaaatatgtttcaatcatcctaaagagtatggtgaatgactcttcccatctaatttctgaacgttcaccaatgtctctagccactttggcactaatagcgatcattcgcttagcgtcttctatattattaactggttgatttaatctatctagcaatggaccgtcggacagcgtcattctcatgttcttaatcaatgtacatacatcgccgtcatctaccaattcatccaacaacataagctttttaaaatcatcattataataggtttgatcgttgtcatttctccaaagaatatatctaataagtagagtcctcatgcttagttaacaactattttttatgttaaatcaattagtacaccgctatgtttaatacttattcatattttagtttttaggattgagaatcaatacaaaaaattaatgcatcattaattttagaaatacttagtttccacgtagtcaatgaaacatttgaactcatcgtacaggacgttctcgtacaggacgtaactataaaccggtttatatttgttcaagatagatacaaatccgataactttttttacgaattctacgggatccactttaaaagtgtcataccgggttctttttatttttttaaacagatcaatggtgtgatgttgattaggtcttttacgaatttgatatagaatagcgtttacatatcctccataatggtcaatcgccatttgttcgtatgtcataaattctttaattatatgacactgtgtattatttagttcatccttgttcattgttaggaatctatccaaaatggcaattatactagaactataggtgcgttgtatacacatattgatgtgtctgtttatacaatcaatgctactaccttcgggtaaaattgtagcatcatataccatttctagtactttaggttcattattatccattgcagaggacgtcatgatcgaatcataaaaaaatatattatttttatgttattttgttaaaaataatcatcgaatacttcgtaagatactccttcatgaacataatcagttacaaaacgtttatatgaagtaaagtatctacgatttttacaaaagtccggatgcataagtacaaagtacgcgataaacggaataataatagatttatctagtctatctttttctatagctttcatagttagatacatggtctcagaagtaggattatgtaacatcagcttcgataaaatgactgggttatttagtcttacacattcgctcatacatgtatgaccgttaactacagagtctacactaaaatgattgaacaatagatagtctaccattgtttcgtattcagatagtacagcgtagtacatggcatcttcacaaattatatcattgtctaatagatatttgacgcatcttatggatcccacttcaacagccatcttaaaatcggtagaatcatattgctttcctttatcattaataatttctagaacatcatctctatcataaaagatacaaatattaactgtttgatccgtaataacattgctagtcgatagcaatttgttaataagatgcgctgggctcaatgtcttaataagaagtgtaagaggactatctccgaatttgttttgtttattaacatccgttgatggaagtaaaagatctataatgtctacattcttgactgttttagagcatacaatatggagaggtgtatttccatcatgatctggttttgagggactaattcctagtttcatcatccatgagattgtagaagcttttggattgtctgacataagatgtctatgaatatgatttttgccaaatttatccactatcctggcttcgaatccgatggacattatttttttaaacactctttctgaaggatctgtacacgccaacaacggaccacatccttcttcatcaaccgagttgttaatcttggctccatactgtaccaataaatttattctctctatgacttcatcatctgttcccgagagataatatagaggcgttttatgctgtttatcacacgcgtttggatctgcgccgtgcgtcagcagcatcgcgactattctattattattaattttagaagctatatgcaatggataatttccatcatcatccgtctcatttggagagtatcctctatgaagaagttcttcgacaaatcgttcatctagtcctttaattccacaatacgcatgtagaatgtgataattatttccagaaggttcgatagcttgtagcatattcctaaatacatctaaatttttactattatatttggcataaagagatagataatactcggccgacataatgttgtccattgtagtataaaaattaatatttctatttctgtatatttgcaacaatttactctctataacaaatatcataacttagttcttttatgtcaagaaggcactggtttagttcatctataaatgtcacgccataactaccacgcatgccatactcagaattatgataaagatatttatccttggggtgtaggtaatggggattaatctttgttggatcagtctctaagttaacacatgtcacacatgatccatttatagttatatcacacgatgatgatttatgaattgattccggaagatcgctatcgtattttgtggttccacaattcatttccatacatgttattgtcacactaatattatgatgaactttatctagccgctgagtggtaaacaacagaacagatagtttattatctttaccaacaccctcagccgctgccacaaatctctgatccgtatccatgatggtcatgtttatttctagtccgtatccagtcaacactatgttagcatttctgtcgatatagctttcactcatatgacactcaccaataatagtagaattaatgtcgtaatttacaccaatagtgagttcggcggcaaagtaccaataccggtaatcttgtcgaggaggacatatagtattcttgtattctaccgaatacccgagagatgcgatacaaaagagcaagactaatttgtaaaccatcttactcaaaatatgtaacaatagtacgatgcaatgagtaagacaataggaaatctatcttatatacacataattattctatcaattttaccaattagttagtgtaatgttaacaaaaatgtgggagaatctaattagtttttctttacacaattgacgtacatgagtctgagttccttgtttttgctaattatttcatccaatttattattcttgacgatatcgagatcttttgtataggagtcaaacttgtattcaacatgcttttctataatcattttagctatttcggcatcatccaatagtacattttccagattagcagaatagatattaatgtcgtatttgaacagagcctgtaacatctcaatgtctttattatctatagccaatttaatgtccggaatgaagagaagggaattattggtgtttgtcgacgtcatatagtcgagcaagagaatcatcatatccacgtgtccattttttatagtgatgtgaatacaactaaggagaatagccagatcaaaagtagatggtatctctgaaagaaagtaggaaacaatacttacatcattaagcatgacggcatgataaaatgaagttttccatccagttttcccatagaacatcagtctccaatttttcttaacaaacagttttaccgtttgcatgttaccactatcaaccgcataatacaatgcggtgtttcccttgtcatcaaattgtgaatcatccagtccactgaatagcaaaatctttactattttggtatcttccaatgtggctgcctgatgtaatggaaattcattctctagaagatttttcaatgctccagcgttcaacaacgtacatactagacgcacgttattatcagctattgcataatacaaggcactatgtccatggacatccgccttaaatgtatctttactagagagaaagcttttcagctgcttagacttccaagtattaattcgtgacagatccatgtctgaaacgagacgctaattagtgtatattttttcattttttataattttgtcatattgcaccagaattaataatatctttaatagatctgattagtagatacatggctatcgcaaaacaacatatacacatttaataaaaataatatttattaagaaaattcagatttcacgtacccatcaatataaataaaataatgattccttacaccgtacccatattaaggagattccaccttacccataaacaatataaatccagtaatatcatgtctgatgatgaacacaaatggtgtattaaattccagtttttcaggagatgatctcgccgtagctaccataatagtagatgcctctgctacagttccttgttcgtcgacatctatctttgcattctgaaacattttataaatatataatgggtccctagtcatatgtttaaacgacgcattatctggattaaacatactaggagccatcatttcggctatcgacttaatatccctcttattttcgatagaaaatttagggagtttaagattgtacactttattccctaattgagacgaccaatagtctaattttgcagccgtgatagaatctgtgaaatgggtcatattatcacctattgccaggtacatactaatattagcatccttatacggaaggcgtaccatgtcatattctttgtcatcgattgtgattgtatttccttgcaatttagtaactacgttcatcatgggaaccgttttcgtaccgtacttattagtaaaactagcattgcgtgttttagtgatatcaaacggatattgccatatacctttaaaatatatagtattaatgattgcccatagagtattattgtcgagcatattagaatctactacattagacataccggatctacgttctactatagaattaattttattaaccgcatctcgtctaaagtttaatctatataggccgaatctatgatattgttgataatacgacggtttaatgcacacagtattatctacgaaactttgataagttagatcagtgtacgtatatttagatgttttcagcttagctaatcctgatattaattctgtaaatgctggacccagatctctttttctcaaatccatagtcttcaataattctattctagtattacctgatgcaggcaatagcgacataaacatagaaaacgaataaccaaacggtgagaagacaatattatcatcttgaatatttttatacgctactataccggcattggtaaatccttgtagacgataggcggacgctgaacacgctaacgatagtatcaataacgcaatcatgattttatggtattaataattaaccttatttttatgttcggtataaaaaaattattgatgtctacacatccttttgtaattgacatctatatatccttttgtataatcaactctaatcactttaacttttacagttttccctaccagtttatccctatattcaacatatctatccatatgcatcttaacactctctgccaagatagcttcagagtgaggatagtcaaaaagataaatatatagagcataatcattctcgtatactctgccctttattacatcacccgcattgggcaacgaataacaaaatgcaagcatcttgttaacgggctcgtaaattgggataaaaattatgtttttattgtcttatatctattttattcaagagaatattcaggaatttctttttccggttgtatctcgtcgcagtatatatcatttgtacattgtttcatattttttaatagtttacaccttttagtaggactagtatcgtacaattcatagctgtattttgaattccaatcacgcataaaaatatcttccaattgttgacgaagacctaatccatcatccggtgtaatattaatagatgctccacatgtatccgtaaagtaatttcctgtccaatttgaggtacctatataggccgttttatcggttaccatatatttggcatggtttaccctagaatacggaatgggaggatcagcatctggtacaataaatagctttacttctatatttatgtttttagattttagcatagcgatagatcttaaaaagtttctcatgataaacgaagatcgttgccagcaactaatcaatagcttaacggatacttgtctgtctatagcggatcttcttaattcatcttctatataaggccaaaacaaaattttacccgccttcgaataaataatagggataaagttcataacagatacataaacgaatttactcgcatttctaatacatgacaataaagcggttaaatcattggttctttccatagtacatagttgttgcggtgcagaagcaataaatacagagtgtggaacgccgcttacgttaatactaagaggatgatctgtattataatacgacggataaaagtttttccaattatatggtagattgttaactccaagataccagtatacctcaaaaatttgagtgagatccgctgccaagttcctattattgaagatcgcaatacccaattccttgacctgagttagtgatctccaatccatgttagcgcttcctaaataaatatgtgtattatcagatatccaaaattttgtatgaagaactcctcctaggatatttgtaatatctatgtatcgtacttcaactccggccatttgtagtctttcaacatcctttaatggtttgttagatttattaacggctactctaactcgtactcctcttttgggtaattgtacaatctcgtttaatattatcgtgccgaaattcgtacccacttcatccgataaactccaataaaaagatgatatatctagtgtttttgtggtattggatagaatttccctccacatgttaaatgtagacaaatatactttatcaaattgcatacctataggaatagtttctgtaatcactgcgattgtattatccggattcattttatttgttaaaagaataatcctatatcacttcactctattaaaaatccaagtttctatttctttcatgactgattttttaacttcatccgtttccttatgaagatgatgtttggcaccttcataaatttttatttctctattacaatttgcatgttgcatgaaataatatgcacctaaaacatcgctaatcttattgtttgttccctggagtatgagagtcgggggggtgttaatcttggaaattatttttctaaccttgttggtagccttcaagacctgactagcaaatccagccttaattttttcatgattgactaatgggtcgtattggtatttataaactttatccatatctctagatactgattctggacatagctttccgactggcgcatttggtgtgatggttcccataagtttggcagctagcagattcagtcttgaaacagcatctgcattaactagaggagacattagaatcattgctgtaaacaagtttggattatcgtaagaggctagctcccatggaatgacccaataagtagatttaatagttaccacgtgctgtaccaaagtcatcaatcatcattttttcaccattacttcttccatgtccaatatgatcatgtgagaatactaaaattcctaacgatgatatgttttcagctagttcgtcataacgtccagaatgtttaccagctccatgacttatgaatactaatgccttaggatatgtaataggtttccaatatttacaatatatgtaatcattgtccagattgaacatacagtttgcactcatgattcacgttatataactatcaatattaacagttcgtttgatgatcatattatttttatgttttattgataattgtaaaaacatacaattaaatcaatatagaggaaggagacggctactgtcttttgtaagatagtcatggcgactaaattagattatgaggatgctgttttttactttgtggatgatgataaaatatgtagtcgcgactccatcatcgatctaatagatgaatatattacgtggagaaatcatgttatagtgtttaacaaagatattaccagttgtggaagactgtacaaggaattgatgaagttcgatgatgtcgctatacggtactatggtattgataaaattaatgagattgtcgaagctatgagcgaaggagaccactacatcaattttacaaaagtccatgatcaggaaagtttattcgctaccataggaatatgtgctaaaatcactgaacattggggatacaaaaagatttcagaatctagattccaatcattgggaaacattacagatttgatgaccgacgataatataaacatcttgatactttttctagaaaaaaaattgaattgatgatataggggtcttcataacgcataattattacgttagcattctatatccgtgttaaaaaaaattatcctatcatgtatttgagagttttatatgtagcaaacatgatagctgtgatgccaataagctttagatattcacgcgtgctagtgttagggatggtattatctggtggtgaaatgtccgttatataatctacaaaacaatcatcgcatatagtatgcgatagtagagtaaacatttttatagtttttactggattcatacatcgtctacccaattcggttataaatgaaattgtcgccaatcttacacccaaccccttgttatccattagcatagtattaacttcgttatttatgtcataaactgtaaatgattttgtagatgccatatcatacatgatattcatgtccctattataatcattactaactttatcacaatatatgttgataatatctatatatgatctagtctttgtgggcaactgtctatacaagtcgtctaaacgttgtttactcatatagtatcgaacagccatcattacatggtcccgttccgttgatagataatcgagtatgttagtggacttgtcaaatctatataccatattttctggaagtggatatacatagtcgtgatcaacattattgctagcctcatcttctatatcctgtactataccattatctatatcatctacataatctatgatattattacacataaacatcgacaacatactattgtttattatctaagtcctgttgatccaaacccttgatctcctctatttgtactatctagagattgtacttcttccagttctggataatatatacgttgatagattagctgagctattctatctccagtatttacattaaacgtacattttccattattaataagaatgactcctatgtttcccctataatcttcgtctattacaccacctcctatatcaatgccttttagtgacagaccagacctaggagctattctaccatagcagaacttaggcatggacatactaatatctgtcttaattaactgtctttctcctggagggatagtataatcgtaagcgctatacaaatcatatccggcagcacccggcgattgcctagtaggagatttagctctgttagtttccttaacaaatctaactggtgagttaatattcatgttgaacataaaactaatattttatttcaaaattatttaccatcccatatattccatgaataagtgtgatgattgtacacttctatagtatctatatacgatccacgataaaatcctcctatcaatagcagtttattatccactatgatcaattctggattatccctcggataaataggatcatctatcagagtccatgtattgctggattcacaataaaattccgcatttctaccaaccaagaataaccttctaccgaacactaacgcgcatgatttataatgaggataataagtggatggtccaaactgccactgatcatgattgggtagcaaatattctgtagttgtatcagtttcagaatgtcctcccattacgtatataacattgtttatggatgccactgctggattacatctaggtttcagaagactcggcatattaacccaagcagcatccccgtggaaccaacgctcaacagatgtgggatttggtagacctcctactacgtataatttattgttagcgggtatcccgctagcatacagtctggggctattcatcggaggaattggaatccaattgtttgatatataatttaccgctatagcattgttatgtatttcattgttcatccatccaccgatgagatatactacttctccaacatgagtacttgtacacatatggaatatatctataatttgatccatgttcataggatactctatgaatggatacttgtatgatttgcgtggttgtttatcacaatgaaatattttggtacagtctagtatccattttacattatttatacctctgggagaaagataatttgacctgattacatttttgataaggagtagcagatttcctaatttatttcttcgctttatataccacttaatgacaaaatcaactacataatcctcatctggaacatttagttcatcgctttctagaataagtttcatagatagataatcaaaattgtctatgatgtcatcttccagttccaaaaagtgtttggcaataaagtttttagtatgacataagagattggatagtccgtattctatacccatcatgtaacactcgacacaatattcctttctaaaatctcgtaagataaagtttatacaagtgtagatgataaattctacagaggttaatatagaagcacgtaataaattgacgacgttatgactatctatatatacctttccagtatacgagtaaataactatagaagttaaactgtgaatgtcaaggtctagacaaaccctcgtaactggatctttatttttcgtgtatttttgacgtaaatgtgtgcgaaagtaaggagataactttttcaatatcgtagaattgactattatattgcctcctatggcatcaataattgttttgaatttcttagtcatagacaatgctaatatattcttacagtacacagtattgacaaatatcggcatttatgtttctttaaaagtcaacatctagagaaaaatgattatctttttgagacataactcccattttttggtattcacccacacgtttttcgaaaaaattagtttttccttccaatgatatattttccatgaaatcaaacggattggtaacattataaatttttttaaatcccaattcagaaatcaatctatccgcgacgaattctatatatgttttcatcatttcacaattcattcctataagtttaactggaagagccgcagtaagaaattcttgttcaatggatactgcatctgttataatagatctaacggtttcttcactcggtggatgcaataaatgtttaaacatcaaacatgcgaaatcgcagtgcagaccctcgtctctactaattagttcgttggaaaacgtgagtccgggcattaggccacgctttttaagccaaaatatggaagcgaatgatccggaaaagaagattccttctactgcagcaaaggcaataagtctctctccataaccggcgctgtcatgtatccacttttgagcccaatcggccttcttttttacacaaggcatcgtttctatggcattaaagagatagtttttttcattactatctttaacataagtatcgatcaaaagactatacatttccgaatgaatgttttcaatggccatctgaaatccgtagaaacatctagcctcggtaatctgtacttctgtacaaaatcgttccgccaaattttcattcactattccgtcactggctgcaaaaaacgccaatacatgttttataaaatatttttcgtctggtgttagtttattccaatcattgatatctttagatatatctacttcttccactgtccaaaatgatgcctctgcctttttatacatgttccagatgtcatgatattggattgggaaaataacaaatctatttggatttggtgcaaggatgggttccataactaaattaacaataacaataaattttttttcagttatctatatgcctgtacttggattttttgtacatcgatatcgccgcaatcactacaataattacaagtattattgatagcattgttattagtactatcataattaaattatctacattcatgggtgctgaataatcgttattatcatcattatcattttgtaattgtgacatcatactagataaatcgtttgcgagattgttgtgggaagcgggcatggaggatgcattatcattattatttaacgccttccatttggattcacaaatgttacgcacattcaacattttatggaaactataattttgtgaaaacaaataacaagaaaactcgtcatcgttcaaatttttaacgatagtaaaccgattaaacgtcgagctaatttctaacgctagcgactctgttggatatgggtttccagatatatatcttttcagttcccctacgtatctataatcatctgtaggaaatggaagatatttccatttatctactgttcctaatatcatatgtggtggtgtagtagaaccattaagcgcgaaagatgttatttcgcatcgtattttaacttcgcaataatttctggttagataacgcactctaccagtcaagtcaatgatattagcctttacagatatattcatagtagtcgtaacgatgactccatcttttagatgcgatactcctttgtatgtaccagaatcttcgtacctcaaactcgatatatttaaacaagttaatgagatattaacgcgttttatgaatgatgatatataaccagaagttttatcctcggtggctagcgctataaccttatcattataataccaactagtgtgattaatatgtgacacgtcagtgtgggtacaaatatgtacattatcgtctacgtcgtattcgatacatccgcatacagccaacaaatataaaatgacaaatactctaacgccgttcgtacccatcttgatgcggtttaataaatgttttgatttcaatttattgtaaaaaaagattcggttttatactgttcgatattctcattgcttatattttcatctatcatctccacacagtcaaatccgtggttagcatgcacctcatcaaccggtaaaagactatcggactcttctatcattataactctagaatatttaatttggtcattattaatcaagtcaattatcttatttttaacaaacgtgagtattttactcattttttataaaaacttttagaaatatacagactctatcgtgtgtctatatcttctttttatatccaatgtatttatgtctgatttttcttcatttatcatatataatggtccaaattctacacgtgcttcggattcatccagatcattaaggttcttataattgtaacatccttctcttccctcttctacatcttccttcttattcttattcttagcgtcacagaatctaccacagcaggatcccatgacgagcgtcatattaaactaatccattttcaattataatatatgattagtaatgaccattaaaataaaaaatattcttcataaccggcaagaaagtgaaaagttcacattgaaactatgtcagtagtatacatcatgaaatgatgatatatatatactctattttggtggaggattatatgatataattcgtggataatcatttttaagacacatttctttattcgtaaatcttttcacgttaaatgagtgtccatattttgcaatttcttcatatgatggcggtgtacgtggacgaggctgctcctgttcttgttgtggtcgccgactgtcgtgtctgcgtttagatccctccattatcgcgattgcgtagatggagtactattttataccttgtaattaaatttttttattaattaaacgtataaaaacgttccgtatctgtatttaagagccagatttcgtctaatagaacaaatagctacagtaaaaataactagaataattgctacacccactagaaaccacggatcgtaatacggcaatcggttttcgataataggtggaacgtatattttatttaaggacttaacaattgtctgtaaaccacaatttgcttccgcggatcctgtattaactatctgtaaaagcatatgttgaccgggcggagccgaacattctccgatatctaatttctgtatatctataatattattaacctccgcatacgcattacagttcttttctagcttggataccgcactaggtacatcgtctagatctattcctatttcctcagcgatagctcttctatccttttccggaagcaatgaaatcacttcaataaatgattcaaccatgagtgtgaaactaagtcgagaattactcatgcatttgttagttattcggagcgcgcaatttttaaactgtcctataacctctcctatatgaatagcacaagtgacattagtagggatagaatgttgagctaatttttgtaaataactatctataaaaagattatacaaagttttaaactctttagtttccgccatttatccagtctgagaaaatgtctctcataataaatttttccaagaaactaattgggtgaagaatggaaacctttaatctatatttatcacagtctgttttggtacacatgatgaattcttccaatgccgtactaaattcgatatctttttcgatttctggatatgtttttaataaagtatgaacaaagaaatggaaatcgtaataccagttatgtttaactttgaaattgttttttattttcttgttaatgattccagccacttgggaaaagtcaaagtcgtttaatgccgatttaatacgttcattaaaaacaaactttttatcctttagatgaattattattggttcattggaatcaaaaagtaagatattatcgggtttaagatctgcgtgtaaaaagttgtcgcaacagggtagttcgtagattttaatgtataacagagccatctgtaaaaagataaactttatgtattgtaccaaagatttaaatcctaatttgatagctaactcggtatctactttatctgccgaatacagtgctaggggaaaaattataatgtttcctctttcatattcgtagttagttctcttttcatgttcgaaaaagtgaaacatgcggttaaaatagtttataacattaatattactgttaataactgccggataaaagtgggatagtaatttcacgaatttgatactgtcctttctctcgttaaacgcctttaaaaaaactttagaagaatatctcaatgagagttcctgaccatccatagtttgtatcaataatagcaacatatgaagaacacgtttatacagagtatgtaaaaatgttaatttatagtttaatcccatggcccacgcacacacgattaattttttttcatctccctttagattgttgtatagaaatttgggtactgtgaactccgccgtagtttccatgggactatataattttgtggcctcgaatacaaattttactacatagttatctatcttaaagactataccatatcctcctgtagatatgtgataaaaatcgtcgtttataggataaaatcgtttatccttttgttggaaaaaggatgaattaatgtaatcattctcttctatctttagtagtgtttccttattaaaattcttaaaataatttaacaatctaactgacggagcccaattttggtgtaaatctaattgggacattatattgttaaaatacaaacagtctcctaatataacagtatctgataatctatggggagacatccattgatattcaggggatgaatcattggcaacacccatttattgtacaaaaagccccaatttacaaacgaaagtccaggtttgatagagacaaacaattaactattttgtctctgtttttaacacctccacagtttttaatttctttagtaatgaaattattcacaatatcagtatcttctttatctaccagagattttactaacttgataaccttggctgtctcattcaatagggtagtaatatttgtatgtgtgatattgatatctttttgaattgtttcttttagaagtgattctttgatggtgccagcatacgaattacaataatgcagaaactcggttaacatgcaggaattatagtaagccaattccaattgttgcctgtgttgtattagagtgtcaatatgagcaatggtgtccttgcgtttctctgatagaatgcgagcagcgattttggcgttatcatttgacgatatttctggaatgacgaatcctgtttctactaactttttggtaggacaaagtgaaacaatcaagaagatagcttctcctcctatttgtggaagaaattgaactcctctagatgatctactgacgatagtatctccttgacagatattggaccgaattacagaagtacctggaatgtaaagccctgaaaccccctcattttttaagcagattgttgccgtaaatcctgcactatgcccaagatagagagctcctttggtgaatccatctctatgtttcagtttaaccaagaaacagtcagctggtctaaaatttccatctctatctaatacagcatctaacttgatgtcaggaactatgaccggtttaatgttatatgtaacattgagtaaatccttaagttcataatcatcactgtcatcagttatgtacgatccaaacaatgtttctaccggcatagtggatacgaagatgctatccatcagaatgtttccctgattagtattttctatatagctattcttctttaaacgattttccaaatcagtaactatgttcatttttttaggagtaggacgcctagccagtatggaagaggattttctagatcctctcttcaacatctttgatctcgatggaatgcaaaaccccatagtgaaacaaccaacgataaaaataatattgtttttcactttttataattttaccatctgactcatggattcattaatatctttataagagctactaacgtataattctttataactgaactgagatatatacaccggatctatggtttccataattgagtaaatgaatgctcggcaataactaatggcaaatgtatagaacaacgaaattatactagagttgttaaagttaatattttctatgagctgttccaataaattatttgttgtgactgcgttcaagtcataaatcatcttgatactatccagtaaaccgtttttaagttctggaatattatcatcccattgtaaagcccctaattcgactatcgaatatcctgctctgatagcagtttcaatatcgacggacgtcaatactgtaataaaggtggtagtattgtcatcatcgtgataaactacgggaatatggtcgttagtaggtacggtaactttacacaacgcgatatataactttccttttgtaccatttttaacgtagttgggacgtcctgcagggtattgttttgaagaaatgatatcgagaacagatttgatacgatatttgttggattcctgattattcactataatataatctagacagatagatgattcgataaatagagaaggtatatcgttggtaggataatacatccccattccagtattctcggatactctattgatgacactagttaagaacatgtcttctattctagaaaacgaaaacatcctacatggactcattaaaacttctaacgctcctgattgtgtctcgaatgcctcgtacaaggatttcaaggatgccatagattctttgaccaacgatttagaattgcgtttagcatctgatttttttattaaatcgaatggtcggctctctggtttgctaccccaatgataacaatagtcttgtaaagataaaccgcaagaaaatttatacgcatccatccaaataaccctagcaccatcggatgatattaatgtattattatagattttccatccacagttattgggccagtatactgttagcaacggtatatcgaatagattactcatgtaacctactagaatgatagttcgtgtactagtcataatatctttaatccaatctaagaaatttaaaattagattttttacactgttaaagttaacaaaggtattacccggatacgtggatatcatatatggcattggtccattatcagtaatagctccataaactgatacggcgatggtttttatatgtgtttgatctaacgaggaagaaattcgcgcccacaattcatctctagatatgtatttaatatcaaacggtaacacatcaatttcgggacgcgtatatgtttctaaatttttaatccaaatataatgatgacctatatgccctattatcatactgtcaactatagtacacctagagaacttacgatacatctgtttcctgtaatcgttaaattttacaaatctataacatgctaaaccttttgacgacagccattcattaatttctgatatggaatctgtattctcgataccgtatcgttctaaagccagtgctatatctccctgttcgtgggaacgctttcgtataatatcgatcaacggataatctgaagtttttggagaataatatgactcatgatctatttcgtccataaacaatctagacataggaattggaggcgatgatcttaattttgtgcaatgagtcgtcaatcctataacttctaatcttgtaatattcatcatcgacataatactatctatgttatcatcgtatattagtataccatgaccttcttcatttcgtgccaaaatgatatacagtcttaaatagttacgcaatatctcaatagtttcataattgttagctgttttcatcaaggtttgtatcctgtttaacatgatggcgttctataacgtctctattttctatttttaattttttaaatttttaacgatttactgtggctagatacccaatctctctcaaatatttttttagcctcgcttacaagctgtttatctatactattaaaactgacgaatccgtgattttggtaatgggttccgtcgaaatttgccgaagtgatatgaacatattcgtcgtcgactatcaacaattttgtattattctgaatagtgaaaaccttcacagatagatcattttgaacacacaacgcatctagacttttggcggttgccatagaatatacgtcgttcttatcccaattaccaactagaagtctgatcttaactcctctattaatggctgcttctataatggagttgtaaatgtcgggccaatagtagctattaccgtcgacacgtgtagtgggaactatggccaaatgttcaatatctatactagtcttagctgacctgagtttatcaataactacatcggtatctagatctctagaatatcccaataggtgttccggagaatcagtaaagaacactccacctataggattcttaatatgatacgcagtgctaactggcaaacaacaagccgcagagcataaattcaaccatgaattttttgcgctattaaaggctttaaaagtatcaaatcttctacgaagatctgtggccagcgggggataatcagaatatacacctaacgttttaatcgtatgtatagatcctccagtaaatgacgcgtttcctacataacatctttcatcatctgacacccaaaaacaaccgagtagtagtcccacattattttttttatctatattaacggttataaaatttatatccgggcagtgactttgtagctctcccagatttcttttccctcgttcatctagcaaaactattattttaatccctttttcagatgcctcttttagtttatcaaaaataagcgctcccctagtcgtactcagaggattacaacaaaaagatgctatgtatatatatttcttagctagagtgataatttcgttaaaacattcaaatgttgttaaatgatcggatctaaaatccatattttctggtagtgtttctaccagcctacattttgctcccgcaggtaccgatgcaaatggccacatttagttaacataaaaacttatacatcctgttctatcaacgattctagaatatcatcggctatatcgctaaaattttcatcaaagtcgacatcacaacctaactcagtcaatatattaagaagttccatgatgtcatcttcgtctatttctatatccgtatccattgtagattgttgaccgattatcgagtttaaatcattactaatactcaatccttcagaatacaatctgtgtttcattgtaaatttataggcggtgtatttaagttggtagattttcaattatgtattaatatagcaacagtagttcttgctcctccttgattctagcatcctcttcattattttcttctacgtacataaacatgtccaatacgttagacaacacaccgacgatggcggccgctacagacacgaatatgactaaaccgatgaccatttaaaaacccctctctagctttcacttaaactgtatcgatcattcttttagcacatgtataatataaaaacattattctatttcgaatttaggcttccaaaaatttttcatccgtaaaccgataataatatatatagacttgttaatagtcggaataaatagattaatgcttaaactatcatcatctccacgattagagatacaatatttacattctttttgctgtttcgaaactttatcaatacacgttaatacaaacccaggaaggagatattgaaactgaggctgttgaaaatgaaacggtgaatacaataattcagataatgtaaaatcatgattccgtattctgatgatattagaactgctaatggatgtcgatggtatgtatctaggagtatctattttaacaaagcatcgatttgctaatatacaattatccttttgattaattgttattttattcatattcttaaaaggtttcatatttatcaattcttctacattaaaaatttccatttttaatttatgtagccccgcaatactcctcattacgtttcattttttgtctataatatccattttgttcatctcggtacatagattatccaattgagaagcgcatttagtagttttgtacattttaagtttattgacgaatcgtcgaaaactagttatagttaacattttattatttgataccctgatattaatacccctgccgttactattatttataactgatgtaatccacgtaacattggaattaactatcgatagtaatgcatcgacgcttccaaaattgtctattataaactcaccgataatttttttattgcatgttttcatattcattaggattatcaaatctttaatcttattacgattgtatgcgttgatattacaagacgtcattctaaaagacggaggatctccatcaaatgccagacaatcacgtacaaagtacatggaaataggttttgttctattgcgcatcatagatttatatagaacacccgtagaaatactaatttgttttactctataaaatactaatgcatctatttcatcgttttgtataacgtctttccaagtgtcaaattccaaatttttttcattgatagtaccaaattcttctatctctttaactacttgcatagataggtaattacagtgatgcctacatgccgttttttgaaactgaatagatgcgtctagaagcgatgctacgctagtcacaatcaccactttcatatttagaatatatatatgtaaaaatatagtagaatttcattttgtttttttctatgctataaatgaattctcattttgcatctgctcatactccgttttatattaataccaaagaaggaagatatctggttctaaaagccgttaaagtatgcgatgttagaactgtagaatgcgaaggaagtaaagcttcctgcgtactcaaagtagataaaccctcatcgcccgcgtgtgagagaagaccttcgtccccgtccagatgcgagagaatgaataaccctggaaaacaagttccgtttatgaggacggacatgctacaaaatatgttcgcggctaatcgcgataatgtagcttctagacttttgtcctaaaatactattatatccttttcgatattaataaatccgtgtcgtccaggttttttatctctttcagtatgtgaatagataggtattttatctctattcatcatcgaatttaagagatccgataaacattgtttgtattctccagatgtcagcatctgatacaacaatatatgtgcacataaacctctggcacttatttcatgtaccttccccttatcactaaggagaatagtatttgagaaatatgtatacatgatattatcatgaattagatatacagaatttgtaacactctcgaaatcacacgatgtgtcggcgttaagatctaatatatcactcgataacacattttcatctagatacactagacattttttaaagctaaaatagtctttagtagtaacagtaactatgcgattattttcatcgatgatacatttcatcggcatattattacgcttaccatcaaagactataccatgtgtatatctaacgtattctagcatggttgccatacgcgcattaaacttttcaggatctttggatagatcttccaatctatctatttgagaaaacatttttatcatgttcaatagttgaaacgtcggatccactatatagatattatctataaagattttaggaactacgttcatggtatcctggcgaatattaaaactatcaatgatatgattatcgttttcatcttttatcaccatatagtttctaagatatgggattttacttaatataatattatttcccgtgataaattttattagaaaggccaaatctataagaaaagtcctagaattagtctgaagaatatctatatcgccgtatagtatatttggattaattagatatagagaatatgatccgtaacatatacaacttttattatggcgtctaagatattcttccatcaacttattaacatttttgactagggaagatacattatgacgtcccattacttttgccttgtctattactgcgacgttcatagaatttagcatatctcttgccaattcttccattgatgttacattataagaaattttagatgaaattacatttggagctttaatagtaagaactcctaatatgtccgtgtatgtggtcactaatacagattgtagttctataatcgtaaataatttacctatattatatgtttgagtctgtttagaaaagtagctaagtatacgatcttttatttctgatgcagatgtattaacatcggaaaaaaatctttttttattcttttttactaaagatacaaatatgtctttgttaaaaacagttattttctgaatatttctagcttgtaattttaacatatgatattcgttcacactaggtactctgcctaaataggtttctataatctttaatgtaatattaggaaaagtattctgatcaggattcctattcattttgaggatttaaaactctgattattgtctaatatggtctctacgcaaactttttcacagagcgatagagtttttgataactcgtttttcttaagaaatataaaactactgtctccagagctcgctctatcttttattttatctaattcgatacaaactcctgatactggttcagaaagtaattcattaattttcagtcctttatagaagatatttaatatagataatacaaaatcttcagtttttgatatcgatctgattgatcctagaactagatatattaataacgtgctcattaggcagtttatggcagcttgataattagatatagtatattccagttcatatttattagataccgcattgcccagattttgatattctatgaattcctctgaaaataaatccaaaataactagacattctattttttgtggattagtgtactctcttccctctatcatgttcactactggtgtccacgatgataaatatctagagggaatataatatagtccataggatgccaatctagcaatgtcgaataactgtaattttattcttcgctcttcattatgaattgattcttgaggtataaacctaacacaaattatattattagacttttcgtatgtaatgtctttcatgttataagtttttaatcctggaatagaatctattttaatgaggcttttaaacgcagagttctccaacgagtcaaagcataatactctgttgtttttcttatatacgatgttacgattttcttctttgaatggaataggtttttgaattagtttataattacaacataatagataaggaagtgtgcaaatagtacgcggaaaaaacataatagctcccctgttttcatccatggttttaagtaaatgatcactggcttctttagtcaatggatattcgaacattaaccgtttcatcatcattggacagaatccatatttcttaatgtaaagagtgatcaaatcattgtgtttattgtaccatcttgttgtaaatgtgtattcggttatcggatctgctcctttttctattaaagtatcgatgtcgatctcgtctaagaattcaactatatcgacatatttcatttgtatacacataaccattactaacgtagaatgtataggaagagatgtaacgggaacagggtttgttgattcgcaaactattctaatacataattcttctgttaatacgtcttgcacgtaatctattatagatgccaagatatctatataattattttgtaagatgatgttaactatgtgatctatataagtagtgtaataattcatgtatttcgatatatgttccaactctgtctttgtgatgtctagtttcgtaatatctatagcatcctcaaaaaatatattcgcatatattcccaagtcttcagttctatcttctaaaaaatcttcaacgtatggaatataataatctattttacctcttctgatatcattaatgatatagtttttgacactatcttctgtcaattgattcttattcactatatctaagaaacggatagcgtccctaggacgaactactgccattaatatctctattatagcttctggacataattcatctattataccagaattaatgggaactattccgtatctatctaacatagttttaagaaagtcagaatctaagacttgatgttcatatattggttcatacatgaaatgatctctattgatgatagtgactatttcattctctgaaaattggtaactcattctatatatgctttccttgttgatgaaggatagaatatactcaatagaatttgtaccaacaaactgttctcttatgaatcgtatatcatcatctgaaataatcatgtaaggcatacatttaacaattagagacttgtctcctgttatcaatatactattcttgtgataatttatgtgtgaggcaaatttgtccacgttctttaattttgttatagtagatatcaaatccaatggagctacagttcttggcttaaacagatatagtttttctggaacaaattctacaacattattataaaggactttgggtaaataagtgggatgaaatcctattttaattaatgcgatagccttgtcctcgtgcagatatccaaacgcttttgtgatagtatggcattcattgtctagaaacgctctacgaatatctgtgacagatatcatctttagagaatatactagtcgcgttaatagtactacaatttgtattttttaatctatctcaataaaaaaattaatatgtatgattcaatgtataactaaactactaactgttattgataactagaatcagaatctaatgatgacgtacccaagaagtttatctactgccaatttagctgcattatttttagcatctcgtttagattttccatctgccttatcgaatactcttccgtcgatatctacacaggcataaaatgtaggagagttactaggcccaactgattcaatacgaaaagaccaatctctcttagttatttggcagtactcattaataacggtgacagggttagcatctttccaatcaataatttttttagccggaataacatcatcaaaagacttatgatcctctctcattgatttttcgcgggatacatcatctattatgacgtcagccataacatcagcatccggcttatccgcctccgttgtcataaaccaacgaggaggaatatcgtcggagctgtacaccatagcactacgttgaagatcgtacagagctttattaacttctcgcttctccatattaagttgtctagttagttgtgcagcagtagctccttcgattccaatggttttaatagcctcacacacaatctctgcgttagaacgttcgtcgatatagattttagacatttttagagagaactaacacaaccagcaataaaactgaacctactttatcatttttttattcatcatcctctggtggttcgtcgttcctatcaaatgtagctctgattaacccgtcatctataggtgatgctggttctggagattctggaggagatggattattatctggaagaatctctgttatttccttgttttcatgtatcgattgcgttgtaacattaagattgcgaaatgctctaaatttgggaggcttaaagtgttgtttgcaatctctacacgcgtgtctaactagtggaggttcgtcagctgctctagtttgaatcatcatcggcgtagtattcctacttttacagttaggacacggtgtattgtatttctcgtcgagaacgttaaaataatcgttgtaactcacatcctttattttatctatattgtattctactcctttcttaatgcattttataccgaataagagatagcgaaggaattctttttcggtgccgctagtacccttaatcatatcacatagtgttttatattccaaatttgtggcaatagacggtttatttctatacgatagtttgtttctggaatcctttgagtattctataccaatattattctttgattcgaatttagtttcttcgatattagattttgtattacctatattcttgatgtagtactttgatgatttttccatggcccattctattaagtcttccaagttggcatcatccacatattgtgatagtaattctcggatatcagtagcggctaccgccattgatgtttgttcattggatgagtaactactaatgtatacattttccatttataacacttatgtattaactttgttcatttatattttttcattattatgttgatattaacaaaagtgaatatatatatatgttaataattgtattgtggttatacggctacaattttataatgagtgaaagtcagtgtccgatgatcaatgacgatagctttactctgaaaagaaagtatcaaatcgatagtgcggagtcaacaataaaaatggataagaagaggataaagtttcagaatagagccaaaatggtaaaagaaataaatcagacaataagagcagcacaaactcattacgagacattgaaactaggatacataaaatttaagagaatgattaggactactactctagaagatatagcaccatctattccaaataatcagaaaacttataaactattctcggacatttcagccatcggcaaagcatcacagaatccgagtaagatggtatatgctctgctgctttacatgtttcccaatttgtttggagatgatcatagattcattcgttatagaatgcatccaatgagtaaaatcaaacacaagatcttctctcctttcaaacttaatcttattagaatattagtggaagaaagattctataataatgaatgcagatctaataaatggaaaataattggaacacaagttgataaaatgttgatagctgaatctgataaatatacaatagatgcaaggtataacctaaaacccatgtatagaatcaagggagaatctgaagaagataccctcttcatcaaacagatggtagaacaatgtgtgacatcccaggaattggtggaaaaagtgttgaagatactgtttagagatttgttcaagagtggagaatacaaagcgtacagatacgatgatgatgtagaaaatggattcattggattggatacactaaaattaaacattgttcatgatatagttgaaccatgtatgcctgttcgtaggccagtggctaagatactgtgtaaagaaatggtaaataaatactttgagaatccgctacatattattggtaaaaatcttcaagagtgcattgactttgttagtgaataggcatttcatctttctccaatactaattcaaattgttaaattaataatggatagtataaatagttattagttataagatagtaaaaataattattagaataagagtgtagtatcatagataactctcttctataaaaatggattttattcgtagaaagtatcttatatacacagtagaaaataatatagattttttaaaggatgatacattaagtaaagtaaacaattttaccctcaatcatgtactagctctcaagtatctagttagcaattttcctcaacacgttattactaaggatgtattagctaataccaatttttttgttttcatacatatggtacgatgttgtaaagtgtacgaagcggttttacgacacgcatttgatgcacccacgttgtacgttaaagcattgactaagaattatttatcgtttagtaacacaatacaatcgtacaaggaaaccgtgcataaactaacacaagatgaaaaatttttagaggttgccgaatacatggacgaattaggagaacttataggcgtaaattatgacttagttcttaatccattatttcacggaggggaacccatcaaagatatggaaatcatttttttaaaactgtttaagaaaacagacttcaaagttgttaaaaaattaagtgttataagattacttatttgggcatacctaagcaagaaagatacaggcatagagtttgcggataatgatagacaagatatatatactctatttcaacaaactggtagaatcgtccatagcaatctaacagaaacgtttagagattatatctttcccggagataagactagctattgggtgtggttaaacgaaagtatagctaatgatgcggatatcgttcttaatagacacgccattaccatgtatgataaaattcttagttatatatactctgagataaaacaaggacgcgttaataaaaacatgcttaagttagtttatatctttgagcctgaaaaagatatcagagaacttctgctagaaatcatatatgatattcctggagatatcctatctattattgatgcaaaaaacgacgattggaaaaaatattttattagtttttataaagctaattttattaacggtaatacatttattagtgatagaacgtttaacgaggacttattcagagttgttgttcaaatagatcccgaatatttcgataatgaacgaattatgtctttattctctacgagtgctgcggacattaaacgatttgatgagttagatattaataacagttatatatctaatataatttatgaggtgaacgatatcacattagatacaatggatgatatgaagaagtgtcaaatctttaacgaggatacgtcgtattatgttaaggaatacaatacatacctgtttttgcacgagtcggatcccatggtcatagagaacggaatactaaagaaactgtcatctataaaatccaagagtagacggctgaacttgtttagcaaaaacattttaaaatattatttagacggacaattggctcgtctaggtcttgtgttagatgattataaaggagacttgttagttaaaatgataaaccatcttaagtctgtggaggatgtatccgcattcgttcgattttctacagataaaaaccctagtattcttccatcgctaatcaaaactattttagctagttataatatttccatcatcgtcttatttcaaaggtttttgagagataatctatatcatgtagaagaattcttggataaaagcatccatctaaccaagacggataagaaatatatacttcaattgataagacacggtagatcatagaacagaccaaatatattattaataatttggtatatacatagatataattatcacacatttttgataaatgggaactgctgcaacaattcagactcccaccaaattaatgaataaagaaaatgcagaaatgattttggaaaaaattgttgatcatatagttatgtatattagtgacgaatcaagtgattcagaaaataatcctgaatatattgattttcgtaacagatacgaagactatagatctctcattataaaaagtgatcacgagtttgtaaagctatgtaaaaatcatgcggagaaaagttctccagaaacgcaacaaatgattatcaaacacatatacgaacaatatcttattccagtatctgaagtactattaaaacctataatgtccatgggtgacataattacatataacggatgtaaagacaatgaatggatgctagaacaactctctaccctaaactttaacaatctccgcacatggaactcatgtagcataggcaatgtaacgcgtctgttttatacattttttagttatctgatgaaagataaactaaatatataagtataatcccattctaatactttaacctgatgtattagcatcttattagaatattaacctaactaaaagacataacataaaaactcattacatagttgataaaaagcggtaggatataaatattatggctgccaccgttccgcgttttgacgacgtgtacaaaaatgcacaaagaagaattctagatcaagaaacattttttagtagaggtctaagtagaccgttaatgaaaaacacatatctatttgataattacgcgtatggatggataccagaaactgcaatttggagtagtagatacgcaaacttagatgcaagtgactattatcccatttcgttgggattacttaaaaagttcgagtttctcatgtctctatataaaggtcctattccagtatacgaagaaaaagtaaatactgaattcattgctaatggatctttctccggtagatacgtatcatatcttagaaagttttctgctcttccaacaaacgagtttattagttttttgttactgacttccattccaatctataatatcttgttctggtttaaaaatactcagtttgatattactaaacacacattattcagatacgtctatacagataatgccaaacacctggcgttggctaggtatatgtatcaaacaggagactataagcctttgtttagtcgtctcaaagagaattatatatttaccggtcccgttccaatatgtatcaaagatatagatcaccctaatcttagtagagcaagaagtccatccgattatgagacattagctaatattagtactatattgtactttaccaagtatgatccggtattaatgtttttattgttttacgtacctgggtattcaattactacaaaaattactccagccgtagaatatctaatggataaactgaatctaacaaagagcgacgtacaactgttgtaaattattttatgcttcgtaaaatgtaggttttgaaccaaacattctttcaaagaatgagatgcataaaactttattatccaatagattgactatttcggacgtcaatcgtttaaagtaaacttcgtaaaatattctttgatcactgccgagtttaaaacttctatcgataattgtttcatatgttttaatatttacaagttttttggtccatggtccattaggacaaatatatgcaaaataatatcgttctccaagttctatagtctctggattatttttattatattcagtaaccaaatacatattagggttatctgcggatttataatttgagtgatgcattcgactcaacataaataattctagaggagacgatctactatcaaattcggatcgtaaatctgtttctaaagaacggagaatatctatacatacctgattagaattcatccgtccttcagacaacatctcagacagtctggttttgtacatcttaatcatattcttatgaaacttggaaacatctcttctagtttcactagtacctttattaattctctcaggtacagattttgaattcgacgatgctgagtatttcatcgttgtatatttcttcttcgattgcataatcagattcttatataccgcctcaaactctattttaaaattattaaacaatactctattattaatcagtcgttctaactctttcgctatttctatagacttatctacatcttgactgtctatctctgtaaacacggagtcggtatctccatacacgctacgaaaacgaaatctgtaatctataggcaacgatgttttcacaatcggattaatatctctatcgtccatataaaatggattacttaatggattggcaaaccgtaacataccgttagataactctgctccatttagtaccgattctagatacaagatcattctacgtcctatggatgtgcaactcttagccgaagcgtatgagtatagagcactatttctaaatcccatcagaccatatactgagttggctactatcttgtacgtatattgcatggaatcatagatggccttttcagttgaactggtagcctgttttagcatctttttatatctggctctctctgccaaaaatgttcttaatagtctaggaatggttccttctatcgatctatcgaaaattgctatttcagagatgaggttcggtagtctaggttcacaatgaaccgtaatatatctaggaggtggatatttctgaagcaatagctgattatttatttcttcttccaatctattggtactaacaacgacaccgactaatgtttccggagatagatttccaaagatacacacattaggatacagactgttataatcaaagattaatacattattactaaacattttttgttttggagcaaataccttaccgccttcataaggaaacttttgttttgtttctgatctaactaagatagttttagtttccaacaatagctttaacagtggacccttgatgactgtactcgctctatattcgaataccatggattgaggaagcacatatgttgacgcacccgcgtctgtttttgtttctactccataatactcccacaaatactgacacaaacaagcatcatgaatacagtatctagccatatctaaagctatgtttagattataatccttatacatctgagctaaatcaacgtcatcctttccgaaagataatttatatgtatcattaggtaaagtaggacataatagtacgactttaaatccattttcccaaatatctttacgaattactttacatataatatcctcatcaacagtcacataattacctgtggttaaaacctttgcaaatgcagcggctttgcctttcgcgtctgtagtatcgtcaccgatgaacgtcatttctctaactcctctatttaatactttacccatgcaactgaacgcgttcttggatatagaatccaatttgtacgaatccaatttttcaaatttttgaatgaatgaatatagatcgaaaaatatagttccattattgttattaacgtgaaacgtagtattggccatgccgcctactcccttatgactagactgatttctctcataaatacagagatgtacagcttcctttttgtccggagatctaaagataattttctctcctgttaataactctagacgattagtaatatatctcagatcaaagttatgtccgttaaaggtaacgacgtagtcgaacgttagttccaacaattgtttagctattcgtaacaaaactatttcagaacatagaactagttctcgttcgtaatccatttccattagtgactgtatcctcaaacatcctctatcgacggcttcttgtatttcctgttccgttaacatctcttcattaatgagcgtaaacaataatcgtttaccacttaaatcgatataacagtaacttgtatgcgagattgggttaataaatacagaaggaaacttcttatcgaagtgacactctatatctagaaataagtacgatcttgggatatcgaatctaggtatttttttagcgaaacagttacgtggatcgtcacaatgataacatccattgttaatctttgtcaaatattgctcgtccaacgagtaacatccgtctggagatatcccgttagaaatataaaaccaactaatattgagaaattcatccatggtggcattttgtatgctgcgtttctttggctcttctatcaaccacatatctgcgacggagcattttctatctttaatatctagattataacttattgtctcgtcaatgtctatagttctcatctttcccaacggcctcgcattaaatggaggaggagacaatgactgatatatttcgtccgtcactacgtaataaaagtaatgaggaaatcgtataaatacggtctcaccatttcgacatctggatttcagatataaaaatctgttttcaccgtgactttcaaaccaattaatgcaccgaacatccatttatagaatttagaaatatattttcatttaaatgaatcccaaacattggggaagagccgtatggaccattatttttatagtactttcgcaagcgggtttagacggcaacatagaagcgtgtaaacgaaaactatatactatagttagcactcttccatgtcctgcatgtagacggcacgcgactatcgctatagaggacaataatgtcatgtctagcgatgatctgaattatatttattattttttcatcagattatttaacaatttggcatctgatcccaaatacgcgatcgatgtgacaaaggttaaccctttataaacttaacccattataaaacttatgattagtcacaactgaaataaccgcgtgattattttttggtataattctacacggcatggtttctgtgactatgaattcaacccccgttacattagtgaaatctttaacaaacagcaagggttcgtcaaagacataaaactcattgtttacaatcgaaatagaccccctatcacacttaaaataaaaaatatccttatcctttaccaccaaataaaattctgattggtcaatgtgaatgtattcacttaacagttccacaaatttatttattaactccgaggcacatacatcgtcggtattttttatggcaaactttactcttccagcatccgtttctaaaaaaatattaacgagttccatttatatcatccaatattattgaaatgacgttgatggacagatgatacaaataagaaggtacggtacctttgtccaccatctcctccaattcatgctctattttgtcattaactttaatgtatgaaaacagtacgccacatgcttccatgacagtgtgtaacactttggatacaaaatgtttgacattagtataattgttcaagactgtcaatctataatagatagtagctataatatattctatgatggtattgaagaagatgacaaccttggcatattgatcatttaacacagacatggtatcaacagatagcttgaatgaaagagaatcagtaattggaataagcgtcttctcgatagagtgtccgtataccaacatgtctgatattttgatgtattccattaaattatttagttttttctttttattctcgttaaacagcatttctgtcaacggaccccaacatcgttgaccgattaagttttgattgatttttccgtgtaaggcgtatctagtcagatcgtatagcctatccaataatccatcatctgtgcgtagatcacatcgtacactttttaattctctatagaagagcgacagacatctggagcaattacagacagcaatttctttattctctacagatgtaagatacttgaagacattcctatgatgatgcagaattttggataacacggtattgatggtatctgttaccataattcctttgatggctgatagtgtcagagcacaagatttccaatctttgacaatttttagcaccattatctttgttttgatatctatatcagacagcatggtgcgtctgacaacacagggattaagacggaaagatgaaatgattctctcaacatcttcaatagataccttgctattttttctggcattatctatatgtgcgagaatatcctctagagaatcagtatcctttttgatgatagtggatctcaatgacatgggacgtttaaaccttcttattctatcaccagattgcatggtgatttgtcttctttcttttatcataatgtaatctctaaattcatcggcaaattgtctatatctaaaatcataatatgagatgtttacctctacaaatatctgttcgtccaatgttagagtatttacatcagttttgtattccaaattaaacatggcaacggatttaattttatattcctctattaagtcctcgtcgataataacagaatgtagataatcatttaatccatcgtacatggttggaagatgcttgttgacaaaatctttaattgtcttgatgaaggtgggactatatctaacatcttgattaataaaatttataacattgtccataggatactttgtaactagttttatacacatctcttcatcggtaagtttagacagaatatcgtgaacaggtggtatattatattcatcagatatacgaagaacaatgtccaaatctatattgtttaatatattatatagatgtagcgtagctcctacaggaatatctttaactaagtcaatgatttcatcaaccgttagatctattttaaagttaatcatataggcattgatttttaaaaggtatgtagccttgactacattctcattaattaaccattccaagtcactgtgtgtaagaagattatattctatcataagcttgactacatttggtcccgataccattaaagaattcttatgatataaggaaacagcttttaggtactcatctactctacaagaattttggagagccttaacgatatcagtgacgtttattatttcaggaggaaaaaacctaacattgagaatatcggaattaatagcttccagatacagtgattttggcaatagtccgtgtaatccataatccagtaacacgagctggtgcttgctagacaccttttcaatgtttaatttttttgaaataagctttgataaagccttcctcgcaaattccggatacatgaacatgtcggcgacatgattaagtattgttttttcattattttctcaataccccaatagatgatagaatatcacccaatgcgtccatgttgtctatttccaacaggtcgctatatccaccaatagaagtttttccaaaaaagattctaggaacagttctaccaccagtaatttgttcaaaatagtcacgcaattcattttcgggtttaaattctttaatatcgacaatttcatacgctcctcttttgaaactaaacttatttagaatatccagtgcatttctacaaaaaggacatgtatacttgacaaaaattgtcactttgttattggccaacctttgttgtacaaattcctcggccattttaatatttaagtgatataaaactatctcgacttatttaactctttagtcgagatatatggacgcagatagctatatgatagccaactacagaaggcaaacgctataaaaaacataattacgacgagcatatttataaatatttttattcagcattacttgatatagtaatattaggcacagtcaaacattcaaccactctcgatacattaactctctcattttctttaacaaattctgcaatatcttcgtaaaaagattcttgaaactttttagaatatctatcgactctagatgaaatagcgttcgtcaacatactatgttttgtatacataaaggcgcccattttaacagtttctagtgacaaaatgctagcgatcctaggatcctttagaatcacatagattgacgattcgtctctcttagtaactctagtaaaataatcatacaatctagtacgcgaaataatattatccttgacttgaggagatctaaacaatctagttttgagaacatcgataagttcatcgggaatgacatacatactatctttaatagaactcttttcatccagttgaatggattcgtccttaaccaactgattaatgagatcttctattttatcattttccagatgatatgtatgtccattaaagttaaattgtgtagcgcttctttttagtctagcagccaatactttaacatcactaatatcgatatacaaaggagatgatttatctatggtattaagaattcgtttttcgacatccgtcaaaaccaattcctttttgcctgtatcatccagttttccatcctttgtaaagaaattattttctactagactattaataagactgataaggattcctccataattgcacaatccaaactttttcacaaaactagactttacaagatctacaggaatgcgtacttcaggttttttagcttgtgattttttcttttgcggacattttctagtaaccaactcatctaccatttcattgattttagcagtgaaataagctttcaatgcacgggcactgatactattgaaaacgagttgatcttcaaattccgccatttaagttcaccaaacaacttttaaatacaaatatatcaatagtagtagaataagaactataaaaaaaataataattaaccaataccaaccccaacaaccggtattattagttgatgtgactgttttctcatcacttagaacagatttaacaatttctataaagtctgtcaaatcatcttccggagaccccataaatacaccaaatatagcggcgtacaacttatccatttatacattgaatattggcttttctttatcgctatcttcatcatattcatcatcaatatcaacaagtcccagattacgagccagatcttcttctacattttcagtcattgatacacgttcactatctccagagagtccgataacgttagccaccacttctctatcaatgattagtttcttgagcgcgaaagtaatttttgtttccgttccggatctatagaagacgataggtgtgataattgccttagccaattgtctttctcttttactgagtgattctagttcaccttctatagatctgagaatggatgattctccagtcgaaacatattctaccatggatccgtttaatttgttgatgaagatggattcatccttaaatgttttctctgtaatagtttccaccgaaagactatgcaaagaatttggaatgcgttccttgtgcttaatgtttccatagacggcttctagaagttgatacaacataggactagccgcggtaacttttatttttagaaagtatccatcgcttctatcttgtttagatttatttttataaagtttagtctctccttccaacataataaaagtggaagtcatttgactagataaactatcagtaagttttatagagatagacgaacaattagcgtattgagaagcatttagtgtaacgtattcgatacattttgcattagatttactaatcgattttgcatactctataacacccgcacaagtctgtagagaatcgctagatgcagtaggtcttggtgaagtttcaactctcttcttgattaccttactcatgattaaacctaaataattgtactttgtaatataatgatatatattttcactttatctcatttgagaataaaaatgtttttgtttaaccactgcatgatgtacagatttcggaatcgcaaaccaccagtggttttattttatccttgtccaatgtgaattgaatgggagcggatgcgggtttcgtacgtagatagtacattcccgtttttagaccgagactccatccgtaaaaatgcatactcgttagtttggaataactcggatctgctatatggatattcatagattgactttgatcgatgaaggctcccctgtctgcagccatttttatgatcgtcttttgtggaatttcccaaatagttttataaactcgcttaatatcttctggaaggtttgtattctgaatggatccaccatctgccataatcctattcttgatctcatcattccataattttctctcggttaaaactctaaggagatgcggattaactacttgaaattctccagacaatactctccgagtgtaaatattactggtatacggttccaccgactcattatttcccaaaatttgagcagttgatgcagtcggcataggtgccaccaataaactatttctaagaccgtatgttctgattttatcttttagaggttcccaattccaaagatccgacggtacaacattccaaagatcatattgtagaataccgttactggcgtacgatcctacatatgtatcgtatggtccttccttctcagctagttcacaactcgcctctaatgcaccgtaataaatggtttcgaagatcttcttatttagatcttgtgcttccaggctatcaaatggataatttaagagaataaacgcgtccgctaatccttgaacaccaataccgataggtctatgtctcttattagagatttcagcttctggaataggataataattaatatctataattttattgagatttctgacaattactttgaccacatccttcagtttgagaaaatcaaatcgcccatctattacaaacatgttcaaggcaacagatgccagattacaaacggctacctcattagcatccgcatattgtattatctcagtgcaaagattactacacttgatagttcctaaattttgttgattactctttttgttacacgcatccttataaagaatgaatggagtaccagtttcaatctgagattctataatcgctttccagacgactcgagcctttattatagatttgtatctcctttctctttcgtatagtgtatacaatcgttcgaactcgtctccccaaacattgtccaatccaggacattcatccggacacatcaacgaccactctccgtcatccttcactcgtttcataaagagatcaggaatccaaagagctataaatagatctctggttctatgttcctcgtttcctgtattctttttaagatcgaggaacgccataatatcagaatgccacggttccaagtatatggccataactccaggccgtttgtttcctccctgatctatgtatctagcggtgttattataaactctcaacattggaataataccgtttgatataccattggtaccggagatatagcttccactggcacgaatattactaattgatagacctattccccctgccattttagagattaatgcgcatcgttttaacgtgtcatagataccctctatgctatcatcgatcatgttaagtagaaaacagctagacatttggtgacgactagttcccgcattaaataaggtaggagaagcgtgcgtaaaccatttttcagaaagtagattgtacgtctcaatagctgagtctatatcccattgatgaattcctactgcgacacgcattaacatgtgctgaggtctttcaacgatcttgttgtttattttcaacaagtaggatttttccaaagttttaaaaccaaaatagttgtatgaaaagtctcgttcgtaaataataaccgagttgagtttatccttatatttgttaactatatccatggtgatacttgaaataatcggagaatgtttcccatttttaggattaacatagttgaataaatcctccatcacttcactaaatagtttttttgtttccttgtgtagatttgatacggctattctggcggctagaatggcataatccggatgttgtgtagtacaagtggctgctatttcggctgccagagtgtccaattctaccgttgttactccattatatattccttgaataaccttcatagctattttaataggatctatatgatccgtgtttaagccataacataattttctaatacgagacgtgattttatcaaacatgacattttccttgtatccatttcgtttaatgacaaacatttttgttggtgtaataaaaaaattatttaacttttcattaatagggatttgacgtatgtagcgtacaaaatgatcgttcctggtatatagataaagagtcctatatatttgaaaatcgttacggctcgattaaactttaatgattgcatagtgaatatatcattaggatttaactccttgactatcatggcggcgccagaaattaccatcaaaagcattaatacagttatgccgatcgcagttaaaacggttatagcatccaccatttatatctaaaaattagatcaaagaatatgtgacaaagtcctagttgtatactgagaattgacgaaacaatgtttcttacatatttttttcttattagtaactgacttaatagtaggaactggaaagctagacttgattattctataagtatagatacccttccagataatgttctctttgataaaagttccagaaaatgtagaattttttaaaaagttatcttttgctattaccaagattgtgtttagacgcttattattaatatgagtgatgaaatccacaccgcctctagatatcgcctttatttccacattagatggtaaatccaatagtgaaactatctttttaggaatgtatggactcgcgtttagaggagtgaacgtcttgggcgtcggaaaggatgattcgtcaaacgaataaacaatttcacaaatggatgttaatgtattagtaggaaattttttgacgctagtggaattgaagattctaatggatgatgttctacctatttcatccgataacatgttaatttccgacaccaacggttttaatatttcgatgatatacggtagtctctctttcggacttatatagcttattccacaatacgagtcattatatactccaaaaaacaaaataactagtataaaatctgtatcgaatgggaaaaacgaaattatcgacataggtatagaatccggaacattgaacgtattaatacttaattctttttctgtggtaagtaccgataggttattgacattgtatggttttaaatattctataacttgagacttgatagatattagtgatgaattgaaaattatttttatcaccacgtgtgtttcaggatcatcgtcgacgcccgtcaaccaaccgaatggagtaaaataaatatcattaatatatgctctagatattagtatttttattaatcctttgattatcatcttctcgtaggcgaatgattccatgatcaagagtgatttgagaacatcctccggagtattaatgggcttagtaaacagtccatcgttgcaataataaaagttatccaagttaaaggatattatgcattcgtttaaagatatcacctcatctgacggagacaattttttggtaggttttagagactttgaagctacttgtttaacaaagttattcatcgtcgtctactattctatttaattttgtagttaatttatcacatatcacattaattgactttttggtccatttttccatacgtttatattcttttaatcctgcgttatccgtttccgttatatccagggatagatcttgcaagttaaatagaatgctcttaaataatgtcattttcttatccgctaaaaatttaaagaatgtataaacctttttcagagatttgaaactcttaggtggtgtcctagtacacaatatcataaacaaactaataaacattccacattcagattccaacagctgattaacttccacattaatacagcctattttcgctccaaatgtacattcgaaaaatctgaataaaacatcgatgtcacaatttgtattatccaatacagaatgtttgtgattcgtgttaaaaccatcggagaaggaatagaaataaaaattattatagtggtggaattcagttggaatattgcctccggagtcataaaaggatactaaacattgttttttatcataaattacacatttccaatgagacaaataacaaaatccaaacattacaaatctagaggtagaacttttaattttgtctttaagtatatacgataagatatgtttattcataaacgcgtcaaatttttcatgaatcgctaaggagtttaagaatctcatgtcaaattgtcctatataatccacttcggatccataagcaaactgagagactaagttcttaatacttcgattgctcatccaggctcctctctcaggctctattttcatcttgacgacctttggattttcaccagtatgtattcctttacgtgataaatcatcgattttcaaatccatttgtgagaagtctatcgccttagatactttttcccgtagtcgaggtttaaaaaaatacgctaacggtatactagtaggtaactcaaagacatcatatatagaatggtaacgcgtctttaactcgtcggttaactctttcttttgatcgagttcgtcgctactattgggtctgctcaggtgccccgactctactagttccaacatcataccgataggaatacaagacactttgccggcggttgtagatttatcatatttttccactacatatccgttacaatttgttaaaaatttagatacatctatattgctacataatccagctagtgaatatatatgacataataaattggtaaatcctagttctggtattttactaattactaaatctgtatatctttccatttatcatggaaaagaatttaccagatatcttcttttttccaaactgcgttaatgtattctcttacaaatattcacaagatgaattcagtaatatgagtaaaacggaacgtgatagtttctcattggccgtgtttccagttataaaacatagatggcataacgcacacgttgtaaaacataaaggaatatacaaagttagtacagaagcacgtggaaaaaaagtatctcctccatcactaggaaaacccgcacacataaacctaaccgcgaagcaatatatatacagtgaacacacaataagctttgaatgttatagttttctaaaatgtataacaaatacagaaatcaattcgttcgatgagtatatattaagaggactattagaagctggtaatagtttacagatattttccaattccgtaggtaaacgaacagatactataggtgtactagggaataagtatccatttagcaaaattccattggcctcattaactcctaaagcacaacgagagatattttcagcgtggatttctcatagacctgtagttttaactggaggaaccggagtgggtaagacgtcacaggtacccaagttattgctttggtttaattatttatttggtggattctctactctagataaaattactgactttcacgaaagaccagtcattctatctcttcctaggatagctttagttagattgcatagcaataccattttaaaatcattgggatttaaggtactagatggatctcctatttctttacggtacggatctataccggaagaattaataaacaaacaaccaaaaaaatatggaattgtattttctacccataagttatctctaacaaaactatttagttatggcactcttattatagacgaagttcatgagcatgatcaaataggagatattattatagcagtagcgagaaagcatcatacgaaaatagattctatgtttttaatgactgccacattagaggatgaccgagaacggctaaaagtatttttacctaatcccgcatttatacatattcctggagatacactgtttaaaattagcgaggtatttattcataataagataaatccatcttccagaatggcatacatagaagaagaaaagagaaatttagttactgctatacagatgtatactcctcctgatggatcatccggtatagtctttgtggcatccgttgcacagtgtcacgaatataaatcatatttagaaaaaagattaccgtatgatatgtatattattcatggtaaggtcttagatatagacgaaatattagaaaaagtgtattcatcacctaatgtatcgataattatttctactccttatttggaatccagcgttactatacgcaatgttacacacatttatgatatgggtagagtttttgtccccgctccttttggaggatcgcaacaatttatttctaaatctatgagagatcaacgaaaaggaagagtaggaagagttaatcctggtacatacgtctatttctatgatctgtcttatatgaagtctatacagcgaatagattcagaatttctacataattatatattgtacgctaataagtttaatctaacactccccgaagatttgtttataatccctacaaatttggatattctatggcgtacaaaggaatatatagactcgttcgatattagtacagaaacatggaataaattattatccaattattatatgaagatgatagagtatgctaaactttatgtactaagtcctattctcgctgaggagttggataactttgagaggacgggagaattaactagtattgtacgagaagccattttatctctaaatttacgaattaagattttaaattttaaacataaagatgatgatacgtatatacacttttgtaaaatattattcggtgtctataacggaacaaacgctactatatattatcatagacctctaacgggatatatgaatatgatttcagatactatatttgttcctgtagataataactaaaaatcaaactctaatgaccacatctttttttagagatgaaaaattttccacatctccttttgtagacacgactaaacattttgcagaaaaaagtttattagtgtttagataatcgtatacttcatcagtgtagatagtaaatgtgaacagataaaaggtattcttgctcaatagattggtaaattccatagaatatattaatcctttcttcttgagatcccacatcatttcaaccagagacgttttatccaatgatttacctcgtactataccacatacaaaactagattttgcagtgacgtcgtacctggtattcctaccaaacaaaattttacttttagttcttttagaaaattctaaggtagaatctctatttgccaatatgtcatctatggaattaccactagcaaaaaatgatagaaatatatattgatacatcgcagctggttttgatctactatactttaaaaacgaatcagattccataattgcctgtatatcatcagctgaaaaactatgttttacacgtattccttcggcatttctttttaatgatatatcttgtttagacaatgataaagttatcatgtccatgagagacgcgtctccgtatcgtataaatatttcattagatgttagacgcttcattaggggtatacttctataaggtttcttaatcagtccatcattggttgcgtcaagaactactatcggatgttgttgggtatctctagtgttacacatggccttactaaagtttgggtaaataactatgatatctctattaattatagatgcatatatttcattcgtcaaggatattagtatcgacttgctatcgtcattaatacgtgtaatgtaatcatataaatcatgcgatagccaaggaaaatttaaatagatgttcatcatataatcgtcgctataattcatattaatacgttgacattgactaatttgtaatatagcctcgccacgaagaaagctctcgtattcagtttcatcgataaaggataccgttaaatataactggttgccgatagtctcatagtctattaagtggtaagtttcgtacaaatacagaatccctaaaatattatctaatgttggattaatctttaccataactgtataaaatggagacggagtcataactattttaccgtttgtacttactggaatagatgaaggaataatctccggacatgctggtaaagacccaaatgtctgtttgaagaaatccaatgttccaggtcctaatctcttaacaaaaattacgatattcgatcccgatatcctttgcattctatttaccagcatatcacgaactatattaagattatctatcatgtctattctcccaccgttatataaatcgcctccgctaagaaacgttagtatatccatacaatggaatacttcatttctaaaatagtattcgttttctaattctttaatgtgaaatcgtatactagaaagggaaaaattatctttgagttttccgttagaaaagaaccacgaaactaatgttctgattgcgtccgattccgttgctgaattaatggatttacaccaaaaactcatataacttctagatgtagaagcattcgctaaaaaattagtagaatcaaaggatataagtagatgttccaacaagtgagcaattcccaagatttcatctatatcattctcgaatccgaaattagaaattcccaagtagatatcctttttcatccgatcgttgatgaaaatacgaactttattcggtaagacaatcatttactaaggagtaaaataggaagtaatgttcgtatgtcgttatcatcgtataaattaaaggtgtgttttttaccattaagtgacattataattttaccaatattggaattataatataggtgtatttgcgcactcgcgacggttgatgcatcggtaaatatagctgtatctaatgttctagtcggtatttcatcatttcgctgtctaataatagcgttttctctatctgtttccattacagctgcctgaagtttattggtcggataatatgtaaaataataagaaatacatacgaataacaaaaataaaataagatataataaagatgccatttagagatctaattttgtttaacttgtccaaattcctacttacagaagatgaggaatcgttggagatagtgtcttccttatgtagaggatttgaaatatcttataatgacttgataacttactttccagataggaaataccataaatatatttataaagtatttgaacatgtagatttatcggaggaattaagtatggaattccatgatacaactctgagagatttagtctatcttagattgtacaagtattccaagtgtatacggccgtgttataaattaggagataatctaaaaggcatagttgttataaaggacaggaatatttatattagggaagcaaatgatgacttgatagaatatctcctcaaggaatacactcctcagatttatacatattctaatgagcgcgtccccataactggttcaaaattaattctttgtggattttctcaagttacatttatggcgtatacaacgtcgcatataacaacaaataaaaaggtagatgttctcgtttccaaaaaatgtatagatgaactagtcgatccaataaattatcaaatacttcaaaatttatttgataaaggaagcggaacaataaacaaaatactcaggaagatattttattcggtaacaggtggccaaactccataggtagctttttctatttcggattttagaatttccaaattcaccagcgatttatcggttttggtgaaatccaaggatttattaatgtccacaaatgccatttgttttgtctgtggattgtatttgaaaatggaaacgatgtagttagatagatgcgctgcaaagtttcctattagggttccgcgctttacgtcacccagcatacttgaatcaccatcctttaaaaaaaatgataagatatcaacatggagtatatcatactcggattttaattcttctactgcatcactgacattttcacaaatactacaatacggtttaccgaaaataatcagtacgttcttcatttatgggtatcaaaaacttaaaatcgttactgctggaaaataaatcactgacgatattagatgataatttatacaaagtatacaatggaatatttgtggatacaatgagtatttatatagccgtcgccaattgtgtcagaaacttagaagagttaactacggtattcataaaatacgtaaacggatgggtaaaaaagggagggcatgtaaccctttttatcgatagaggaagtataaaaattaaacaagacgttagagacaagagacgtaaatattctaaattaaccaaggacagaaaaatgttagaattagaaaagtgtacatccgaaatacaaaatgttaccggatttatggaagaagaaataaaggcagaaatgcaattaaaaatcgataaactcacatttcaaatatatttatctgattctgataacataaaaatatcattgaatgagatactaacacatttcaacaataatgagaatgttacattattttattgtgatgaacgagacgcagaattcgttatgtgtctcgaggctaaaacacatttctctaccacaggagaatggccgttgataataagtaccgatcaggatactatgctatttgcatctgctgataatcatcctaagatgataaaaaacttaactcaactgtttaaatttgttccctcggcagaggataactatttagcaaaattaacggcgttagtgaatggatgtgatttctttcctggactctatggggcatctataacacccaccaacttaaacaaaatacaattgtttagtgattttacaatcgataatatagtcactagtttggcaattaaaaattattatagaaagactaactctaccgtagacgtgcgtaatattgttacgtttataaacgattacgctaatttagacgatgtctactcgtatattcctccttgtcaatgcactgttcaagaatttatattttccgcattagatgaaaaatggaatgaatttaaatcatcttatttagaaagcgtgccgttaccctgccaattaatgtacgcgttagaaccacgcaaggagattgatgtttcagaagttaaaactttatcatcttatatagatttcgaaaatactaaatcagatatcgatgttataaaatctatatcctcgatcttcggatattctaacgaaaactgtaacacgatagtattcggcatctataaggataatttactactgagtataaataattcattttactttaacgatagtctgttaataaccaatactaaaagtgataatataataaatataggttactagattaaaaatggtgttccaactcgtgtgctctacatgcggtaaagatatttctcacgaacgatataaattgattatacgaaaaaaatcattaaaggatgtactcgtcagtgtaaagaacgaatgttgtaggttaaaattatctacacaaatagaacctcaacgtaacttaacagtgcaacctctattggatataaactaatatggatccggttaattttatcaagacatatgcgcctagaggttctattatttttattaattataccatgtcattaacaagtcatttgaatccatcgatagaaaaacatgtgggtatttattatggtacgttattatcggaacacttggtagttgaatctacctatagaaaaggagttcgaatagtcccattggatagtttttttgaaggatatcttagtgcaaaagtatacatgttagagaatattcaagttatgaaaatagcagctgatacgtcattaactttattgggtattccgtatggatttggtcataatagaatgtattgttttaaattggtagctgactgttataaaaatgccggtattgatacatcgtctaaacgaatattgggcaaagatatttttctgagccaaaacttcacagacgataatagatggataaagatatatgattctaataatttaacattttggcaaattgattaccttaaagggtgagttaatatgcataactactcctccgttgttttttccctcgttctttttcttaacgttgtttgccatcactctcataatgtaaagatattctaaaatggtaaacttttgcatatcggacgcagaaattggtataaatgttgtaattgtattatttcccgtcaatggactagtcacagctccatcagttttatatcctttagagtatttctcactcgtgtctaacattctagagcattccatgatctgtttatcgttgatattggccggaaagatagattttttattttttattatattactattggcaattgtagatataacttctggtaaatatttttctaccttttcaatctcttctattttcaagccggctatatattctgctatattgttgctagtatcaataccttttctggctaagaagtcatatgtggtattcactatatcagttttaactggtagttccattagcctttccacttctgcagaataatcagaaattggttctttaccagaaaatccagctactataataggctcaccgatgatcattggcaaaatcctatattgtaccagattaatgagagcatatttcatttccaataattctgctagttcttgagacattgatttatttgatgaatctagttggttctctagatactctaccatttctgccgcatacaataacttgttagataaaatcagggttatcaaagtgtttagcgtggctagaatagtgggcttgcatgtattaaagaatgcggtagtatgagtaaaccgttttaacgaattatatagtctccagaaatctgtggcgttacatacatgagccgaatgacatcgaagattgtccaatatttttaatagctgctctttgtccattatttctatatttgactcgcaacaattgtagataccattaatcaccgattcctttttcgatgccggacaatagcacaattgtttagctttggactctatgtattcagaattaatagatatatctctcaatacagattgcactatacattttgaaactatgtcaaaaattgtagaacgacgctgttctgcagccatttaactttaaataatttacaaaaatttaaaatgagcatccgtataaaaatcgataaactgcgccaaattgtggcatatttttcagagttcagtgaagaagtgtctataaatgtagactcgacggatgagttaatgtatatttttgccgccttgggcggatctgtaaacatttgggcaattatacctctaagtgcatcagtgttttaccgaggagccgaaaatattgtgtttaatcttcctgtgtccaaggtaaaatcgtgtttgtgtagttttcacaatgatgccatcatagatatagaacctgatctggaaaataatctagtaaaactttctagttatcatgtagtaagtgtcgattgtaacaaggaactgatgcctattaggacagatactactatttgtctaagtatagatcaaaagaaatcttacgtgtttaattttcacaagtatgaagaaaaatgttgtggtagaaccgtcattcatctagaatggttgttgggctttatcaagtgtattagtcagcatcagcatctggctattatgtttaaagatgacaatattattatgaagactcctggtaatactgatgcgttttccagggaatattctatgactgaatgttctcaagaactacaaaagttttctttcaaaatagctatctcgtctctcaacaaactacgaggattcaaaaagagagtcaatgtttttgaaactagaatcgtaatggataatgacgataacattttaggaatgttgttttcggatagagttcaatcctttaagatcaacatctttatggcgtttttagattaatactttcaatgagataaatatgggtggcggagtaagtgttgagctccctaaacgggatccgcctccgggagtacccactgatgagatgttattaaacgtggataaaatgcatgacgtgatagctcccgctaagcttttagaatatgtgcatataggaccactagcaaaagataaagaggataaagtaaagaaaagatatccagagtttagattagtcaacacaggacccggtggtctttcggcattgttaagacaatcgtataatggaaccgcacccaattgctgtcgcacttttaatcgtactcattattggaagaaggatggaaagatatcagataagtatgaagagggtgcagtattagaatcgtgttggccagacgttcacgacactggaaaatgcgatgttgatttattcgactggtgtcagggggatacgttcgatagaaacatatgccatcagtggatcggttcagcctttaataggagtaatagaactgtagagggtcaacaatcgttaataaatctgtataataagatgcaaacattatgtagtaaagatgctagtgtaccaatatgcgaatcatttttgcattatttacgcgcacacaatacagaagatagcaaagagatgatcgattatattctaagacaacagtctgcggactttaaacagaaatatatgagatgtagttatcccactagagataagttagaagagtcattaaaatatgcggaacctcgagaatgttgggatccagagtgttcgaatgccaatgttaatttcttactaacacgtaattataataatttaggactttgcaatattgtacgatgtaataccagcgtgaacaacttacagatggataaaacttcctcattaagattgtcatgtggattaagcaatagtgatagattttctactgttcccgtcaatagagcaaaagtagttcaacataatattaaacactcgttcgacctaaaattgcatttgatcagtttattatctctcttggtaatatggatactaattgtagctatttaaatgggtgccgcggcaagcatacagacgacggtgaatacactcagcgaacgtatctcgtctaaattagaacaagaagcgaacgctagtgctcaaacaaaatgtgatatagaaatcggaaatttttatatccgacaaaaccatggatgtaacctcactgttaaaaatatgtgctctgcggacgcggatgctcagttggatgctgtgttatcagccgctacagaaacatatagtggattaacaccggaacaaaaagcatacgtgccagctatgtttactgctgcgttaaacattcagacgagtgtaaacactgttgttagagattttgaaaattatgtgaaacagacttgtaattctagcgcggtcgtcgataacaaattaaagatacaaaacgtaatcatagatgaatgttacggagccccaggatctccaacaaatttggaatttattaatacaggatctagcaaaggaaattgtgccattaaagcgttgatgcaattgacgactaaggccactactcaaatagcacctagacaagttgctggtacaggagttcagttttatatgattgttatcggtgttataatattggcagcgttgtttatgtactatgccaagcgtatgttgttcacatccaccaatgataaaatcaaacttattttagccaataaggaaaacgtccattggactacttacatggacacattctttagaacttctccgatggttattgctaccacggatatgcaaaactgaaaatatattgataatattttaatagattaacatggaagttatcgctgatcgtctagacgatatagtgaaacaaaatatagcggatgaaaaatttgtagattttgttatacacggtctagagcatcaatgtcctgctatacttcgaccattaattaggttgtttattgatatactattatttgttatagtaatttatatttttacggtacgtctagtaagtagaaattatcaaatgttgttggtggtgctagtcatcacattaactattttttattactttatactataatagtactagactgacttctaacaaacatctcacctgccataaataaatgcttgatattaaagtcttctatttctaacactattccatctgtggaaaataatactctgacattatcgctaattgacacatcggtgagtgatatgcctataaagtaataatcttctttgggcacatataccagtgtaccaggttctaacaacctatttactggtgctcctgtagcatactttttctttaccttgagaatatccatcgtttgcttggtcaatagcgatatgtgattttttatcaaccactcaaaaaagtaattggagtgttcatatcctctacgggctattgtctcatggccgtgtatgaaatttaagtaacacgactgtggtagatttgttctatagagccgattgccgcaaatagatagaactaccaatatgtctgtacaaatgttaaacattaattgattaacagaaaaaacaatgttcgttctgggaatagaaaccagatcaaaacaaaattcgttagaatatatgccacgtttatacatggaatataaaataactacagtttgaaaaataacagtatcatttaaacatttaacttgcggggttaatctcacaactttactgtttttgaactgttcaaaatatagcatcgatccgtgagaaatacgtttagccgcctttaatagaggaaatcccaccgcctttctggatctcaccaacgacgatagttctgaccagcaactcatttcttcatcatccacctgttttaacatataataggcaggagatagatatccgtcattgcaatattccttctcgtaggcacacaatctaatattgataaaatctccattctcttctctgcatttattatcttgtctcggtggctgattaggctgtggtcttggtttaggccttggtctatcgttgttgaatctattttggtcattaaatctttcatttcttcctggtatatttttatcacctcgtttggttggatttttgtctatattatcgtttgtaacatcggtacgggtattcatttatcacaaaaaaaacttctctaaatgagtctactgctagaaaacctcatcgaagaagataccatattttttgcaggaagtatatctgagtatgatgatttacaaatggttattgccggcgcaaaatccaaatttccaagatctatgctttctatttttaatatagtacctagaacgatgtcaaaatatgagttggagttgattcataacgaaaatatcacaggagcaatgtttaccacaatgtataatataagaaacaatttgggtctaggagatgataaactaactattgaagccattgaaaactatttcttggatcctaacaatgaagttatgcctcttattattaataatacggatatgactgccgtcattcctaaaaaaagtggtaggagaaagaataagaacatggttatcttccgtcaaggatcatcacctatcttgtgcattttcgaaactcgtaaaaagattaatatttataaagaaaatatggaatccgcgtcgactgagtatacacctatcggagacaacaaggctttgatatctaaatatgcgggaattaatgtcctgaatgtgtattctccttccacatccataagattgaatgccatttacggattcaccaataaaaataaactagagaaacttagtactaataaggaactagaatcgtatagttctagccctcttcaagaacccattaggttaaatgattttctgggactattggaatgtgttaaaaagaatattcctctaacagatattccgacaaaggattgattactataaatggagaatgttcctaatgtatactttaatcctgtgtttatagagcccacgtttaaacattctttattaagtgtttataaacacagattaatagttttatttgaagtattcgttgtattcattctaatatatgtattttttagatctgaattaaatatgttcttcatgcctaaacgaaaaatacccgatcctattgatagattacgacgtgctaatctagcgtgtgaagacgataaattaatgatctatggattaccatggatgacaactcaaacatctgcgttatcaataaatagtaaaccgatagtgtataaagattgtgcaaagcttttgcgatcaataaatggatcacaaccagtatctcttaacgatgttcttcgcagatgatgattcattttttaagtatttggctagtcaagatgatgaatcttcattatctgatatattgcaaatcactcaatatctagactttctgttattattattgatccaatcaaaaaataaattagaagctgtgggtcattgttatgaatctctttcagaggaatacagacaattgacaaaattcacagactttcaagattttaaaaaactgtttaacaaggtccctattgttacagatggaagggtcaaacttaataaaggatatttgttcgactttgtgattagtttgatgcgattcaaaaaagaatcctctctagctaccaccgcaatagatcctgttagatacatagatcctcgtcgtgatatcgcattttctaacgtgatggatatattaaagtcgaataaagtgaacaataattaattctttattgtcatcatgaacggcggacatattcagttgataatcggccccatgttttcaggtaaaagtacagaattaattagacgagttagacgttatcaaatagctcaatataaatgcgtgactataaaatattctaacgataatagatacggaacgggactatggacgcatgataagaataattttgaagcattggaagcaactaaactatgtgatgtcttggaatcaattacagatttctccgtgataggtatcgatgaaggacagttctttccagacattgtttaattctgtgagcgtatggcaaacggtaccgagctcggtttggaattagtgaaagcttaaaaattgaaattttattttttttttttggaatataaataagctcgaagtcgaccaccatggtgggtgaggatagcgtgctgatcaccgagaacatgcacatgaaactgtacatggagggcaccgtgaacgaccaccacttcaagtgcacatccgagggcgaaggcaagccctacgagggcacccagaccatgaagatcaaggtggtcgagggcggccctctccccttcgccttcgacatcctggctaccagcttcatgtacggcagcaaaacctttatcaaccacacccagggcatccccgacttctttaagcagtccttccctgagggcttcacatgggagaggatcaccacatacgaagacgggggcgtgctgaccgctacccaggacaccagcctccagaacggctgcctcatctacaacgtcaagatcaacggggtgaacttcccatccaacggccctgtgatgcagaagaaaacactcggctgggaggccagcaccgagatgctgtaccccgctgacagcggcctgagaggccatagccagatggccctgaagctcgtgggcgggggctacctgcactgctccctcaagaccacatacagatccaagaaacccgctaagaacctcaagatgcccggcttctacttcgtggacaggagactggaaagaatcaaggaggccgacaaagagacctacgtcgagcagcacgagatggctgtggccaggtactgcgacctgcctagcaaactggggcacagctgattaattaatttttatcgatctaattcaacaatgtctggagagctcggatccttctgtgagcgtatggcaaacgaaggaaaaatagttatagtagccgcactcgatgggacatttcaacgtaaaccgtttaataatattttgaatcttattccattatctgaaatggtggtaaaactaactgctgtgtgtatgaaatgctttaaggaggcttccttttctaaacgattgggtgaggaaaccgagatagagataataggaggtaatgatatgtatcaatcggtgtgtagaaagtgttacgtcggctcataatattatattttttatctaaaaaactaaaaataaacattgattaaattttaatataatacttaaaaatggatgttgtgtcgttagataaaccgtttatgtattttgaggaaattgataatgagttagattacgaaccagaaagtgcaaatgaggtcgcaaaaaaactgccgtatcaaggacagttaaaactattactaggagaattattttttcttagtaagttacagcgacacggtatattagatggtgccaccgtagtgtatataggatcggctcctggtacacatatacgttatttgagagatcatttctataatttaggagtgatcatcaaatggatgctaattgacggccgccatcatgatcctattttaaatggattgcgtgatgtaactctagtgactcggttcgttgatgaggaatatctacgatccatcaaaaaacaactgcatccttctaagattattttaatttctgatgtgagatccaaacgaggaggaaatgaacctagtacggcggatttactaagtaattacgctctacaaaatgtcatgattagtattttaaaccccgtggcgtctagtcttaaatggagatgcccgtttccagatcaatggatcaaggacttttatatcccacacggtaataaaatgttacaaccttttgctccttcatattcagctgaaatgagattattaagtatttataccggtgagaacatgagactgactcgagttaccaaattagacgctgtaaattatgaaaaaaagatgtactaccttaataagatcgtccgtaacaaagtagttgttaactttgattatcctaatcaggaatatgactattttcacatgtactttatgctgaggaccgtgtactgcaataaaacatttcctactactaaagcaaaggtactatttctacaacaatctatatttcgtttcttaaatattccaacaacatcaactgaaaaagttagtcatgaaccaatacaacgtaaaatatctagcaaaaattctatgtctaaaaacagaaatagcaagagatccgtacgcggtaataaatagaaacgtactactgagatatactaccgatatagagtataatgatttagttactttaataaccgttagacataaaattgattctatgaaaactgtgtttcaggtatttaacgaatcatccataaattatactccggttgatgatgattatggagaaccaatcattataacatcgtatcttcaaaaaggtcataacaagtttcctgtaaattttctatacatagatgtggtaatatctgacttatttcctagctttgttagactagatactacagaaactaatatagttaatagtgtactacaaacaggcgatggtaaaaagactcttcgtcttcccaaaatgttagagacggaaatagttgtcaagattctctatcgccctaatataccattaaaaattgttagatttttccgcaataacatggtaactggagtagagatagccgatagatctgttatttcagtcgctgattaatcaattagtagagatgagataagaacattataataatcaataatatatcttatatcttatatcttatatcttatatcttgtttagaaaaatgctaatattaaaatagctaacgctagtaatccaatcggaagccatttgatatctataatagggtatctaatttcctgatttaaatagcggacagctatattctcggtagctactcgtttggaatcacaaacattatttacatctaatttactatctgtaatggaaacgtttcccaatgaaatggtacaatccgatacattgcattttgttatatttttttttaaagaggctggtaacaacgcatcgcttcgtttacatggctcgtaccaacaataatagggtaatcttgtatctattcctatccgtactatgcttttatcaggataaatacatttacatcgtatatcgtctttgttagcatcacagaatgcataaatttgttcgtccgtcatgataaaaatttaaagtgtaaatataactattatttttatagttgtaataaaaagggaaatttaattgtatactttcggttctttaaaagaaactgacttgataaaaatggctgtaatctctaaggttacgtatagtctatatgatcaaaaagagattaatgctacagatattatcattagtcatgttaaaaatgacgacgatatcggtaccgttaaagatggtagactaggtgctatggatggggcattatgtaagacttgtgggaaaacggaattggaatgtttcggtcactggggtaaagtaagtatttataaaactcatatagttaagcctgaatttatttcagaaattattcgtttactgaatcatatatgtattcactgcggattattgcgttcacgagaaccgtattccgacgatattaacctaaaagagttatcgggacacgctcttaggagattaaaggataaaatattatccaagaaaaagtcatgttggaacagtgaatgtatgcaaccgtatcaaaaaattactttttcaaagaaaaaggtttgtttcgtcaacaagttggatgatattaacgttcctaattctctcatctatcaaaagttaatttctattcatgaaaagttttggccattattagaaattcatcaatatccagctaacttattttatacagactactttcccatccctccgttgattattagaccggctattagtttttggatagatagtatacccaaagagaccaatgaattaacttacttattaggtatgatcgttaagaattgtaacttgaatgctgatgaacaggttatccagaaggcggtaatagaatacgatgatattaaaattatttctaataacactaccagtatcaatttatcatatattacatccggcaaaaataatatgattagaagttatatcgtcgcccgacgaaaagatcagaccgctagatctgtaattggtcccagtacatctatcaccgttaatgaggtaggaatgcccgcatatattagaaatacacttacagaaaagatatttgttaatgcctttacagtggataaagttaaacaactattagcgtcaaaccaagttaaattttactttaataaacgattaaaccaattaacaagaatacgccaaggaaagtttattaaaaataaaatacatttattgcctggtgattgggtagaagtagctgttcaagaatatacaagtattatttttggaagacagccgtctctacatagatacaacgtcatcgcttcatctatcagagctaccgaaggagatactatcaaaatatctcccggaattgccaactctcaaaatgctgatttcgacggggatgaggaatggatgatattagaacaaaatcctaaagctgtaattgaacaaagtattcttatgtatccgacgacgttactcaaacacgatattcatggagcccccgtttatggatctattcaagatgaaatcgtagcagcgtattcattgtttaggatacaagatctttgtttagatgaagtattgaacatcttggggaaatatggaagagagttcgatcctaaaggtaaatgtaaattcagcggtaaagatatctatacttacttgataggtgaaaagattaattatccgggtctcttaaaggatggtgaaattattgcaaacgacgtagatagtaattttgttgtggctatgaggcatctgtcattggctggactcttatccgatcataagtcgaacgtggaaggtatcaactttattatcaagtcatcttatgtttttaagagatatctatctatttacggttttggggtgacattcaaagatctgagaccaaattcgacgttcactaataaattggaggccatcaacgtagaaaaaatagaacttatcaaagaagcatacgccaaatatctcaacgatgtaagagacgggaaaatagttccattatctaaagctttagaggcggactatgtggaatccatgttatccaacttgacaaatcttaatatccgagagatagaagaacatatgagacaaacgctgatagatgatccagataataacctcctgaaaatggccaaagcgggttataaagtaaatcccacagaactaatgtatattctaggtacgtatggacaacaaaggattgatggtgaaccagcagagactcgagtattgggtagagttttaccttactatcttccagactctaaggatccagaaggaagaggttatattcttaattctttaacaaaaggattaacgggttctcaatattacttttcgatgctggttgcaagatctcaatctactgatatcgtctgtgaaacatcacgtaccggaacactggctagaaaaatcattaaaaagatggaggatatggtggtcgacggatacggacaagtagttataggtaatacgctcatcaagtacgccgccaattataccaaaattctaggctcagtatgtaaacctgtagatcttatctatccagatgagtccatgacttggtatttggaaattagtgctctgtggaataaaataaaacagggattcgtttactctcagaaacagaaacttgcaaagaagacattggcgccgtttaatttcctagtattcgtcaaacccaccactgaggataatgctattaaggttaaggatctgtacgatatgattcataacgtcattgatgatgtgagagagaaatacttctttacggtatctaatatagattttatggagtatatattcttgacgcatcttaatccttctagaattagaattacaaaagaaacggctatcactatctttgaaaagttctatgaaaaactcaattatactctaggtggtggaactcctattggaattatttctgcacaggtattgtctgagaagtttacacaacaagccctgtccagttttcacactactgaaaaaagtggtgccgtcaaacaaaaacttggtttcaacgagtttaataacttgactaatttgagtaagaataagaccgaaattatcactctggtatccgatgatatctctaaacttcaatctgttaagattaatttcgaatttgtatgtttgggagaattaaatccagacatcactcttcgaaaagaaacagataggtatgtagtagatataatagtcaatagattatacatcaagagagcagaaataaccgaattagtcgtcgaatatatgattgaacgatttatctcctttagcgtcattgtaaaggaatggggtatggaaacattcattgaggatgaggataatattagatttactgtctacctaaatttcgttgaaccggaagaattgaatcttagtaagtttatgatggttcttccgggtgccgccaacaagggaaagattagtaaattcaagattcctatctctgactatacgggttatgacgacttcaatcaaacaaaaaagctcaataagatgactgtagaactcatgaatctaaaagaattgggttctttcgatttggaaaacgtcaacgtgtatcctggagtatggaatacatacgatatcttcggtatcgaggccgctcgtgaatacttgtgcgaagccatgttaaacacctatggagaagggttcgattatctgtatcagccttgtgatcttctcgctagtttactatgtgctagttacgaaccagaatcagtgaataaattcaagttcggcgcagctagtactcttaagagagctacgttcggagacaataaagcattgttaaacgcggctcttcataaaaagtcagaacctattaacgataatagtagctgccacttttttagcaaggtccctaatataggaactggatattacaaatactttatcgacttgggtcttctcatgagaatggaaaggaaactatctgataagatatcttctcaaaagatcaaggaaatggaagaaacagaagacttttaattcttatcaataacatatttttctatgatctgtcttttaaacgatggattttccacaaatgcgcctctcaagtccctcatagaatgatacacgtataaaaaatatagcataggcaatgactccttatttttagacattagatatgccaaaatcatagccccgcttctatttactcccgcagcacaatgaaccaacacgggctcgtttcgttgatcacatttagataaaaaggcggttacgtcgtcaaaatatttactaatatcggtagttgtatcatctaccaacggtatatgaataatattaatattagagttaggtaatgtatatttatccatcgtcaaatttaaaacatatttgaacttaacttcagatgatggtgcatccatagcatttttataatttcccaaatacacattattggttacccttgtcattatagtgggagatttggctttgtgcatatctccagttgaacgtagtagtaagtatttatacaaacttttcttatccatttataacgtacaaatggataaaactactttatcggtaaacgcgtgtaatttagaatacgttagagaaaaggctatagtaggcgtacaagcagccaaaacatcaacacttatattctttgttattatattggcaattagtgcgctattactctggtttcagacgtctgataatccagtctttaatgaattaacgagatatatgcgaattaaaaatacggttaacgattggaaatcattaacggatagcaaaacaaaattagaaagtgatagaggtagacttctagccgctggtaaggatgatatattcgacttcaaatgtgtggatttcggcgcctattttatagctatgcgattggataagaaaacatatctgccgcaagctattaggcgaggtactggagacgcgtggatggttaaaaaggcggcaaaggtcgatccatctgctcaacaattttgtcagtatttgataaaacacaagtctaataatgttattacttgtggtaatgagatgttaaatgaattaggttatagcggttattttatgtcaccgcattggtgttccgattttagtaatatggaatagtgttagataaatgcggtaacgaatgttcctgtaaggaaccataacagcttagatttaacgttaaagatgagcataaacataataaacaaaattacaatcaaacttataacattaatatcaaacaatccaaaaaatgaaatcagtggagtagtaaacgcgtacataactcctggataacgtttagcagctgccgttcctattctagaccaaaaatttggtttcatgttttcgaaacggtattctgcaacaagtcggggatcgtgttctacatatttggcggcattatccagtatctgcctattgatcttcatttcgttttcgattctggctatttcaaaataaaatcccgatgatagacctccagactttataatttcatctacgatgttcagcgccgtagtaactctaataatataggctgataagctaacatcataccctcctgtatatgtgaatatggcatgatttttgtccattacaagctcggttttaactttattgcctgtaataatttctctcatctgtaggatatctatttttttgtcatgcattgccttcaagacgggacgaagaaacgtaatatcctcaataacgttatcgttttctacaataactacatattctacctttttattttctaactcggtaaaaaaattagaatcccatagggctaaatgtctagcgatatttcttttcgtttcctctgtacacatagtgttacaaaaccctgaaaagaagtgagtatacttgtcatcatttctaatgtttcctccagtccactgtataaacgcataatccttgtaatgatctggatcatccttgactaccacaacatttcttttttctggcataacttcgttgtcctttacatcatcgaacttctgatcattaatatgctcatgaacattaggaaatgtttctgatggaggtctatcaataactggcacaacaataacaggagttttcaccgccgccatttagttattgaaattaatcatatacaactctttaatacgagttatattttcgtctatccattgtttcacatttacatatttcgacaaaaagatataaaatgcgtattccaatgcttctctgtttaatgaattactaaaatatacaaacacgtcactgtctggcaataaatgatatcttagaatattgtaacaatttattttgtattgcacatgttcgtgatctatgagttcttcttcgaatggcataggatctccgaatctgaaaacgtataaataggagttagaataataatatttgagagtattggtaatatataaactctttagcggtataattagtttttttctctcaatttctatttttagatgtgatggaaaaatgactaattttgtagcattagtatcatgaactctaatcaaaatcttaatatcttcgtcacacgttagctctttgaagtttttaagagatgcatcagttggttctacagatggagtaggtgcaacaattttttgttctacacatgtatgtactggagccattgttttaactataatggtgcttgtatcgaaaaactttaatgcagatagcggaagctcttcgccgcgactttctacgtcgtaattgggttctaacgccgatctctgaatggatactagttttctaagttctaatgtgattctctgaaaatgtaaatccaattcctccggcattatagatgtgtatacatcggtaaataaaactatagtatccaacgatcccttctcgcaaattctagtcttaaccaaaaaatcgtatataaccacggagatggcgtatttaagagtggattcttctaccgttttgttcttggatgtcatataggaaactataaagtccgcactactgttaagaatgattactaacgcaactatatagttcaaattaagcattttggaaacataaaataactctgtagacgatacttgactttcgaataagtttgcagacaaacgaagaaagaacagacctctcttaatttcagaagaaaactttttttcgtattcctgacgtctagagtttatatcaataagaaagttaagaattagtcggttaatgttgtatttcattacccaagtttgagatttcataatattatcaaaagacatgataatattaaagataaagcgctgactatgaacgaaatagctatatggttcgctcaagaatatagtcttgttaaacgtggaaacgataactgtatttttaatcacgtcagcggcatctaaattaaatataggtatatttattccacacactctacaatatgccacaccatcttcataataaataaattcgttagcaaaattattaattttagtgaaatagttagcgtcaactttcatagcttccttcaatctaatttgatgctcacacggtgcgaattccactctaacatcccttttccatgcctcaggttcatcgatctctataatatctagttttttgcgtttcacaaacacaggctcgtctctcgcgatgagatctgtatagtaactatgtaaatgataactagatagaaagatgtagctatatagatgacgatcctttaagagaggtataataactttaccccaatcagatagactgttgttatggtcttcggaaaaagaatttttataaatttttccagtattttccaaatatacgtacttaacatctaaaaaatccttaatgataataggaatggataatccgtctattttataaagaaatacatatcgcacattatacttttttttggaaatgggaataccgatgtgtctacataaatatgcaaagtctaaatattttttagagaatcttagttggtccaaattcttttccaagtacggtaatagatttttcatattgaacggtatcttcttaatctctggttctagttccgcattaaatgatgaaactaagtcactatttttataactaacgattacatcacctctaacatcatcatttaccagaatactgatcttcttttgtcgtaaatacatgtctaatgtgttaaaaaaaagatcatacaagttatacgtcatttcatctgtggtattcttgtcattgaaggataaactcgtactaatctcttctttaacagcctgttcaaatttatatcctatatacgaaaaaatagcaaccagtgtttgatcatccgcgtcaatattctgttctatcgtagtgtataacaatcgtatatcttcttctgtgatagtcgatacgttataaaggttgataacgaaaatatttttatttcgtgaaataaagtcatcgtaggattttggacttatattcgcgtctagtagatatgcttttatttttggaatgatctcaattagaatagtctctttagagtccatttaaagttacaaacaactaggaaattggtttatgatgtataatttttttagtttttatagattctttattctatacttaaaaaatgaaaataaatacaaaggttcttgagggttgtgttaaattgaaagcgagaaataatcataaattatttcattatcgcgatatccgttaagtttgtatcgtaatggcgtggtcaattacgaataaagcggatactagtagcttcacaaagatggctgaaatcagagctcatctaaaaaatagcgctgaaaataaagataaaaacgaggatattttcccggaagatgtaataattccatctactaagcccaaaaccaaacgagccactactcctcgtaaaccagcggctactaaaagatcaaccaaaaaggaggaagtggaagaagaagtagttatagaggaatatcatcaaacaactgaaaaaaattctccatctcctggagtcagcgacattgtagaaagcgtggccgctgtagagctcgatgatagcgacggggatgatgaacctatggtacaagttgaagctggtaaagtaaatcatagtgctagaagcgatctctctgacctaaaggtggctaccgacaatatcgttaaagatcttaagaaaattattactagaatctctgcagtatcgacggttctagaggatgttcaagcagctggtatctctagacaatttacttctatgactaaagctattacaacactatctgatctagtcaccgagggaaaatctaaagttgttcgtaaaaaagttaaaacttgtaagaagtaaatgcgtgcacttttttataaagatggtaaactctttaccgataataattttttaaatcctgtatcagacgataatccagcgtatgaggttttgcaacatgttaaaattcctactcatttaacagatgtagtagtatatgaacaaacgtgggaggaggcgttaactagattaatttttgtgggaagcgattcaaaaggacgtagacaatacttttacggaaaaatgcatgtacagaatcgcaacgctaaaagagatcgtatttttgttagagtatataacgttatgaaacgaattaattgttttataaacaaaaatataaagaaatcgtccacagattccaattatcagttggcggtttttatgttaatggaaactatgttttttattagatttggtaaaatgaaatatcttaaggagaatgaaacagtagggttattaacactaaaaaataaacacatagaaataagtcccgatgaaatagttatcaagtttgtaggaaaggacaaagtttcacatgaatttgttgttcataagtctaatagactatataaaccgctattgaaactgacggatgattctagtcccgaagaatttctgttcaacaaactaagtgaacgaaaggtatatgaatgtatcaaacagtttggtattagaatcaaggatctccgaacgtatggagtcaattatacgtttttatataatttttggacaaatgtaaagtccatatctcctcttccatcaccaaaaaagttaatagcattaactatcaaacaaactgctgaagtggtaggtcatactccatcaatttcaaaaagagcttatatggcaacgactattttagaaatggtaaaggataaaaattttttagatgtagtatctaaaactacgttcgatgaattcctatctatagtcgtagatcacgttaaatcatctacggatggatgatatagatctttacacaaataattacaagaccgataaatggaaatggataagcgtatgaaatctctcgcaatgacagctttcttcggagagctaagcacattagatattatggcattgataatgtctatatttaaacgccatccaaacaataccattttttcagtggataaggatggtcagtttatgattgatttcgaatacgataattataaggcttctcaatatttggatctgaccctcactccgatatctggagatgaatgcaagactcacgcatcgagtatagccgaacaattggcgtgtgtggatattattaaagaggatattagcgaatatatcaaaactactccccgtcttaaacgatttataaaaaaataccgcaatagatcagatactcgcatcagtcgagatacagaaaagcttaaaatagctctagctaaaggcatagattacgaatatataaaagacgcttgttaataagtaaatgaaaaaaaactagtcgtttataataaaacacgatatggatgccaacgtagtatcatcttctactattgcgacgtatatagacgctttagcgaagaatgcttcagaattagaacagaggtctaccgcatacgaaataaataatgaattggaactagtatttattaagccgccattgattactttgacaaatgtagtgaatatctctacgattcaggaatcgtttattcgatttaccgttactaataaggaaggtgttaaaattagaactaagattccattatctaaggtacatggtctagatgtaaaaaatgtacagttagtagatgctatagataacatagtttgggaaaagaaatcattagtgacggaaaatcgtcttcacaaagaatgcttgttgagactatcgacagaggaacgtcatatatttttggattacaagaaatatggatcctctatccgactagaattagtcaatcttattcaagcaaaaacaaaaaactttacgatagactttaagctaaaatattttctaggatccggtgcccaatctaaaagttctttgttgcacgctattaatcatccaaagtcaaggcctaatacatctctggaaatagaattcacacctagagacaatgaaacagttccatatgatgaactaataaaggaattgacgactctctcgcgtcatatatttatggcttctccagagaatgtaattctttctccgcctattaacgcgcctataaaaacctttatgttgcctaaacaagatatagtaggtttggatctggaaaatctatatgccgtaactaagactgacggcattcctataactatcagagttacatcaaacgggttgtattgttattttacacatcttggttatattattagatatcctgttaagagaataatagattccgaagtagtagtctttggtgaggcagttaaggataagaactggaccgtatatctcattaagctaatagagcctgtgaatgcaatcaatgatagactagaagaaagtaagtatgttgaatctaaactagtggatatttgtgatcggatagtattcaagtcaaagaaatacgaaggtccgtttactacaactagtgaagtcgtcgatatgttatctacatatttaccaaagcaaccagaaggtgttattctgttctattcaaagggacctaaatctaacattgattttaaaattaaaaaggaaaatactatagaccaaactgcaaatgtagtatttaggtacatgtccagtgaaccaattatctttggagaatcgtctatctttgtagagtataagaaatttagcaacgataaaggctttcctaaagaatatggttctggtaagattgtgttatataacggcgttaattatctaaataatatctattgtttggaatatattaatacacataatgaagtgggtattaagtccgtggttgtacctattaagtttatagcagaattcttagttaatggagaaatacttaaacctagaattgataaaaccatgaaatatattaactcagaagattattatggaaatcaacataatatcatagtcgaacatttaagagatcaaagcatcaaaataggagatatctttaacgaggataaactatcggatgtgggacatcaatacgccaataatgataaatttagattaaatccagaagttagttattttacgaataaacgaactagaggaccgttgggaattttatcaaactacgtcaagactcttcttatttctatgtattgttccaaaacatttttagacgattccaacaaacgaaaggtattggcgattgattttggaaacggtgctgacctggaaaaatacttttatggagagattgcgttattggtagcgacggatccggatgctgatgctatagctagaggaaatgaaagatacaacaaattaaactctggaattaaaaccaagtactacaaatttgactacattcaggaaactattcgatccgatacatttgtctctagtgtcagagaagtattctattttggaaagtttaatatcatcgactggcagtttgctatccattattcttttcatccgagacattatgctaccgtcatgaataacttatccgaactaactgcttctggaggcaaggtattaatcactaccatggacggagacaaattatcaaaattaacagataaaaagacttttataattcataagaatttacctagtagcgaaaactatatgtctgtagaaaaaatagctgatgatagaatagtggtatataatccatcaacaatgtctactccaatgactgaatacattatcaaaaagaacgatatagtcagagtgtttaacgaatacggatttgttcttgtagataacgttgatttcgctacaattatagaacgaagtaaaaagtttattaatggcgcatctacaatggaagatagaccgtctacaaaaaactttttcgaactaaatagaggagccattaaatgtgaaggtttagatgtcgaagacttacttagttactatgttgtttatgtcttttctaagcggtaaataataatatggtatgggttctgatatccccgttctaaatgcattaaataattccaatagagcgatttttgttcctataggaccttccaactgtggatactctgtattgttaatagatatattaatacttttgtcgggtaacagaggttctacgtcttctaaaaataaaagttttataacatctggcctgttcataaataaaaacttggcgattctatatatactcttattatcaaatctagccattgtcttatagatgtgagctactgtaggtgtaccatttgattttctttctaatactatatatttctctcgaagaagttcttgcacatcatctgggaataaaatactactgttgagtaaatcagttattttttttatatcgatattgatggacatttttatagttaaggataataagtatcccaaagtcgataacgacgataacgaagtatttatacttttaggaaatcacaatgactttatcagattaaaattaacaaaattaaaggagcatgtatttttttctgaatatattgtgactccagatacatatggatctttatgcgtcgaattaaatgggtctagttttcagcacggtggtagatatatagaggtggaggaatttatagatgctggaagacaagttagatggtgttctacatccaatcatatatctaaagatatacccgaagatatgcacactgataaatttgtcatttatgatatatacacttttgacgctttcaagaataaacgattggtattcgtacaggtacctccgtcgttaggagatgatagtcatttgactaatccgttattgtctccgtattatcgtaattcagtagccagacaaatggtcaataatatgatttttaatcaagattcatttttaaaatatttattagaacatctgattagaagccactatagagtttctaaacatataacaatagttagatacaaggataccgaagaattaaatctaacgagaatatgttataatagagataagtttaaggcgtttgtattcgcttggtttaacggcgtttcggaaaatgaaaaggtactagatacgtataaaaaggtatctaatttgatataatgaattcagtgactgtatcacacgcgccatatactattacttatcacgatgattgggaaccagtaatgagtcaattggtagagttttataacgaagtagccagttggctgctacgagacgagacgtcgcctattcctgataagttctttatacagttgaaacaaccgcttagaaataaacgagtatgtgtgtgcggtatagatccgtatccgaaagatggaactggtgtaccgttcgaatcaccaaattttacaaaaaaatcaattaaggagatagcttcatctatatctagattaaccggagtaattgattataaaggttataaccttaatataatagacggggttataccctggaattattacttaagttgtaaattaggagaaacaaaaagtcacgcgatctactgggataagatttccaagttactgctgcagcatataactaaacacgttagtgttctttattgtttgggtaaaacagatttctcgaatatacgggcaaagttagaatccccggtaactaccatagtcggatatcatccagcggctagagaccgccaattcgagaaagatagatcatttgaaattatcaacgttttactggaattagacaacaaggcacctataaattgggctcaagggtttatttattaatgctttagtgaaattttaacttgtgttctaaatggatgcggctattagaggtaatgatgttatctttgttcttaagactataggtgtcccgtcagcgtgcagacaaaatgaagatccaagatttgtagaagcatttaaatgcgacgagttagaaagatatattgagaataatccagaatgtacactattcgaaagtcttagggatgaggaagcatactctatagtcagaattttcatggatgtagatttagacgcgtgtctagacgaaatagattatttaacggctattcaagattttattatcgaggtgtcaaactgtgtagctagattcgcgtttacagaatgcggtgccattcatgaaaatgtaataaaatccatgagatctaatttttcattgactaagtctacaaatagagataaaacaagttttcatattatctttttagacacgtataccactatggatacattgatagctatgaaacgaacactattagaattaagtagatcatctgaaaatccactaaccagatcgatagacactgccgtatataggagaaaaacaactcttcgggttgtaggtactaggaaaaatccaaattgcgacactattcatgtaatgcaaccaccgcatgataatatagaagattacctattcacttacgtggatatgaacaacaatagttattacttttctctacaacaacgattggaggatttagttcctgataagttatgggaaccagggtttatttcattcgaagacgctataaaaagagtttcaaaaatattcattaattctataataaactttaatgatctcgatgaaaataattttacaacggtaccactggtcatagattacgtaacaccttgtgcattatgtaaaaaacgatcgcataaacatccgcatcaactatcgttggaaaatggtgctattagaatttacaaaactggtaatccacatagttgtaaagttaaaattgttccgttggatggtaataaactgtttaatattgcacaaagaattttagacactaactctgttttattaaccgaacgaggagaccatatagtttggattaataattcatggaaatttaacagcgaagaacccttgataacaaaactaattttgtcaataagacatcaactacctaaggaatattcaagcgaattactctgtccgaggaaacgaaagactgtagaagctaacatacgagacatgttagtagattcagtggagaccgatacctatccggataaacttccgtttaaaaatggtgtattggacctggtagacggaatgttttactctggagatgatgctaaaaaatatacgtgtactgtatcaaccggatttaaatttgacgatacaaagttcgtcgaagacagtccagaaatggaagagttaatgaatatcattaacgatatccaaccattaacggatgaaaataagaaaaatagagagctatatgaaaaaacattatctagttgtttatgcggtgctaccaaaggatgtttaacattcttttttggagaaactgcaactggaaagtcgacaaccaaacgtttgttaaagtctgctatcggtgacctgtttgttgagacgggtcaaacaattttaacagatgtattggataaaggacctaatccatttatcgctaacatgcatttgaaaagatctgtattctgtagcgaactacctgattttgcatgtagtgggtcaaagaaaatcagatctgataatattaaaaagttgacagaaccttgtgtcattggaagaccgtgtttctccaataaaattaataatagaaaccatgcgacaatcattatcgatactaattacaaacctgtttttgataggatagataacgcattaatgagaagaattgccgtcgtgcgattcagaacacacttttctcaaccttctggtagagaggctgctgaaaataatgacgcgtacgataaagtcaaactattagacgaggggttagatggtaaaatacaaaataatagatatagattcgcatttctatacttgttggtgaaatggtacagaaaatatcatgttcctattatgaaactatatcctacacccgaagagattcctgactttgcattctatctcaaaataggtactctgttagtatctagctctgtaaagcatattccattaatgacggacctctccaaaaagggatatatattgtacgataatgtggttactcttccgttgactactttccaacagaaaatatccaagtattttaattctagactatttggacacgatatagagagcttcatcaatagacataagaaatttgccaatgttagtgatgaatatctgcaatatatattcatagaggatatttcatctccgtaaatatatgctcatatatttatagaagatatcacatatctaaatgaataccggaatcatagatttatttgataatcatgttgatagtataccaactatattacctcatcagttagctactctagattatctagttagaactatcatagatgagaacagaagcgtgttattgttccatattatgggatcaggtaaaacaataatcgctttgttgttcgccttggtagcttccagatttaaaaaggtttacattctagtgccgaacatcaacatcttaaaaattttcaattataatatgggtgtagctatgaacttgtttaatgacgaattcatagctgagaatatctttattcattccacaacaagtttttattctcttaattataacgataacgtcattaattataacggattatctcgctacaataactctatttttatcgttgatgaggcacataatatctttgggaataatactggagaacttatgaccgtgataaaaaataaaaacaagattccttttttactattgtctggatctcccattactaacacacctaatactctgggtcatattatagatttaatgtccgaagagacgatagattttggtgaaattattagtcgtggtaagaaagtaattcagacacttcttaacgaacgcggtgtgaatgtacttaaggatttgcttaaaggaagaatatcatattacgaaatgcctgataaagatctaccaacgataagatatcacggacgtaagtttctagatactagagtagtatattgtcacatgtctaaacttcaagagagagattatatgattactagacgacagctatgttatcatgaaatgtttgataaaaatatgtataacgtgtcaatggcagtattgggacaacttaatctgatgaataatttagatactttatttcaggaacaggataaggaattgtacccaaatctgaaaataaataatggcgtgttatacggagaagaattggtaacgttaaacattagttccaaatttaaatactttattaatcggatacagacactcaacggaaaacattttatatacttttctaattctacatatggcggattggtaattaaatatatcatgctcagtaatggatattctgaatataatggttctcagggaactaatccacatatgataaacggcaaaccaaaaacatttgctatcgttactagtaaaatgaaatcgtctttagaggatctattagatgtgtataattctcctgaaaacgatgatggtagtcaattgatgtttttgttttcatcaaacattatgtccgaatcctatactctaaaagaggtaaggcatatttggtttatgactatcccagatactttttctcaatacaaccaaattcttggacgatctattagaaaattctcttacgccgatatttctgaaccagttaatgtatatcttttagccgccgtatattccgatttcaatgacgaagtgacgtcattaaacgattacacacaggatgaattaattaatgttttaccatttgacatcaaaaagctgttgtatctaaaatttaagacgaaagaaacgaatagaatatactctattcttcaagagatgtctgaaacgtattctcttccaccacatccatcaattgtaaaagttttattgggagaattggtcagacaatttttttataataattctcgtattaagtataacgataccaagttacttaaaatggttacatcagttataaaaaataaagaagacgctaggaattacatagatgatattgtaaacggtcacttctttgtatcgaataaagtatttgataaatctcttttatacaaatacgaaaacgatattattacagtaccgtttagactttcctacgaaccatttgtttggggagttaactttcgtaaagaatataacgtggtatcttctccataaaactgatgagatatataaagaaataaatgtcgagctttgttaccaatggatacctttccgttacattggaaccacacgagctgacgttagacataaaaactaatattaggaatgccgtatataagacgtatctccatagagaaattagtggtaaaatggccaagaaaatagaaattcgtgaagacgtggaattacctctcggcgaaatagttaataattctgtagttataaacgttccgtgtgtaataacctacgcgtattatcacgttggggatatagtcagaggaacattaaacatcgaagatgaatcaaatgtaactattcaatgtggagatttaatctgtaaactaagtagagattcgggtactgtatcatttagcgattcaaagtactgcttttttcgaaatggtaatgcgtatgacaatggcagcgaagtcactgccgttctaatggaggctcaacaaggtatcgaatctagttttgtttttctcgcgaatatcgtcgactcataaaaaagagaatagcggtaagtataaacacgaatactatggcaataattgcgaatgttttattctcttcgatatatttttgataatatgaaaaacatgtctctctcaaatcggacaaccatctcataaaatagttctcgcgcgctggagaggtagttgccgctcgtataatctctccagaataatatacttgcgtgtcgtcgttcaatttatacggatttctatagttctctgttatataatgcggtttgccctcatgattagacgacgacaatagtgttctaaatttagatagttgatcagaatgaatgtttattggcgttggaaaaattatccatacagcgtctgcagagtggttgatagttgttcctagatatgtaaaataatccaacttactaggcagcaaattgtctagataaaatactgaatcaaacggtgcagacgtattggcggatctaatggaatccaattgattaactatcttttgaaaatatacatttttatgatccaatacttgtaagaatatagaaataatgataagtccatcatcgtgtttttttgcctcttcataagaactatattttttcttattccaatgaacaagattaatctctccagagtatttgtacacatctatcaagtgattggatccataatcgtcttcctttccccaatatatatgtagtgatgataacacatattcattggggagaaaccctccacttatatatcctcctttaaaattaatccttactagttttccagtgttctggatagtggttggtttcgactcattataatgtatgtctaacggcttcaatcgcgcgttagaaattgcttttttagtttctatattaataggagatagttgttgcggcatagtaaaaatgaaatgataactgtttaaaaatagctcttagtatgggaattacaatggatgaggaagtgatatttgaaactcctagagaattaatatctattaaacgaataaaagatattccaagatcaaaagacacgcatgtgtttgctgcgtgtataacaagtgacggatatccgttaataggagctagaagaacttcattcgcgttccaggcgatattatctcaacaaaattcagattctatctttagagtatccactaaactattacggtttatgtactacaatgaactaagagaaatctttagacggttgagaaaaggttctatcaacaatatcgatcctcactttgaagagttaatattattgggtggtaaactagataaaaaggaatctattaaagattgtttaagaagagaattaaaagaggaaagtgatgaacgtataacagtaaaagaatttggaaatgtaattctaaaacttacaacacgggataaattatttaataaagtatatataagttattgcatggcgtgttttattaatcaatcgttggaggatttatcgcatactagtatttacaatgtagaaattagaaagattaaatcattaaatgattgtattaacgacgataaatacgaatatctgtcttatatttataatatgctagttaatagtaaatgaacttttacagatctagtataattagtcagattattaagtataatagacgactagctaagtctattatttgcgaggatgactctcaaattattacactcacggcattcgttaaccaatgcctatggtgtcataaacgagtatccgtgtccgctattttattaactactgataacaaaatattagtatgtaacagacgagatagttttctctattctgaaataattagaactagaaacatgtttagaaagaaacgattatttctgaattattccaattatttgaacaaacaggaaagaagtatactatcgtcatttttttctctagatccagctactactgataatgatagaatagatgctatttatccgggtggcatacccaaaaggggtgagaatgttccagagtgtttatccagggaaattaaagaagaagttaatatagacaattcttttgtattcatagacactcggttttttattcatggcatcatagaagataccattattaataaattttttgaggtaatcttctttgtcggaagaatatctctaacgagtgatcaaatcattgatacatttaaaagtaatcatgaaatcaaggatctaatatttttagatccgaattcaggtaatggactccaatacgaaattgcaaaatatgctctagatactgcaaaacttaaatgttacggccatagaggatgttattatgaatcattaaaaaaattaactgaggatgattgattagaaaatataaattaatttaccatcgtgtatttttataacgggattgtccggcatatcatgtagatagttaccgtctacatcgtatactcgaccatctacgcctttaaatcctctatttattgacattaatctattagaattggaataccaaatattagtaccctcaattagtttattggtaatattttttttagacgatagatcgatggctcttgaaaccaaggttttccaaccggactcattgtcgatcggtgagaagtctttttcattagcatgaatccattctaatgatgtatgtttaaacactctaaacaattggacaaattcttttgatttgctttgaatgatttcaaataggtcttcgtctacagtaggcataccattagataatctagccattataaagtgcacgtttacatatctacgttctggaggagtaagaacgtgactattgagacgaatggctcttcctactatctgacgaagagacgcctcgttccatgtcatatctaaaatgaagatatcattaattgagaaaaaactaataccctcgcctccactagaagagaatacgcatgttttaatgcattctccgttagtgtttgattcttggttaaactcagccaccgccttgattctagtatcttttgttctagatgagaactctatattagagataccaaagactttgaaatatagtaataagatttctattcctgactgattaacaaatggttcaaagactagacatttaccatgggatgctaatattcccaaacatacatctataaatttgacgcttttctcttttaattcagtaaatagagagatatcagccgcactagcatcccctttcaatagttctccctttttaaaggtatctaatgcggatttagaaaactctctatctcttaatgaatttttaaaatcattatatagtgttgctatctcttgcgcgtattcgcccggatcacgattttgtctttcaggaaagctatcgaacgtaaacgtagtagccatacgtctcagaattctaaatgatgatatacctgtttttatttcagcgagtttagccttttgataaatttcttcttgctttttcgacatattaacgtatcgcattaatactgttttcttagcgaatgatgcagacccttctacgtcatcaaaaatagaaaactcgttattaactatatacgaacatagtcctcctagtttggagactaattctttttcatcgactagacgtttattctcaaatagtgattggtgttgtaaggatcctggtcgtagtaagttaaccaacatggtgaattcttgcacactattgacgataggtgtagccgataaacaaatcatcttatggttttttaacgcaatggtcttagataaaaaattatatactgaacgagtaggacggatcttaccatcttctttgattaatgatttagaaatgaagttatgacattcatcaatgatgacgcatattctactcttggaattaatagttttgatattagtaaaaaatttatttctaaaattttgatcatcgtaattaataaaaatacaatccttcgttatctctggagcgtatctgagtatagtgttcatccaaggatcttctatcaaagcctttttcaccaataagataatagcccaattcgtataaatatccttaagatgtttgagaatatatacagtagtcattgttttaccgacacccgtttcatggaacaataaaagagaatgcatactgtctaatcctaagaaaactcttgctacaaaatgttgataatccttgaggcgtactacgtccgaccccatcatttcaacgggcatattagtagttctgcgtaaggcataatcgatataggccgcgtgtgatttactcatttatgagtgataagtaataactatgttttaaaaatcacagcagtagtttaactagtcttctctgatgtttgttttcgatactttttgaatcagaagtcatactagaataaagcaacgagtgaacgtaatagagagcttcgtatactctattcgaaaactctaagaacttattaatgaattccgtatccactggattgtttaaaatactaaattgaacactgttcacatccttccaagaagaagacttagtgacggacttaacatgagacataaataaatccaaattttttttacaaacatcactagccaccataatggcgctatctttcaaccagctatcgcttacgcattttagcagtctaacatttttaaagagactacaatatattctcatagtatcgattacacctctaccgaataaagttggaagtttaataatacaatatttttcgtttacaaaatcaaataatggtcgaaacacgtcgaaggttaacatcttataatcgctaatgtatagattgttttcagtgagatgattattagatttaatagcatctcgttcacgtttgaacagtttattgcgtgcgctgaggtcggcaactacggcgtccgctttagtactcctcccataatactttacgctattaatctttaaaatttcatagactttatctagatcgctttctggtaacatgatatcatgtgtaaaaagttttaacatgtcggtcggcattctatttagatcattaactctagaaatctgaagaaagtaattagctccgtattccagactaggtaatgggcttttacctagagacagattaagttctggcaatgtttcataaaatggaagaaggacatgcgttccctcccggatattttttacaatttcatccatttacaactctatagtttgttttcattattattagttattatctcccataatcttggtaatacttaccccttgatcgtaagataccttatacaggtcattacatacaactaccaattgtttttgtacataatagattggatggttgacatccatggtggaataaactactcgaacagatagtttatctttccccctagatacattagccgtaatagttgtcggcctaaagaatatctttggtgtaaagttaaaagttagggttcttgttccattattgctttttgtcagtagttcattataaattctcgagatgggtccgttctctgaatatagaacatcatttccaaatctaacttctagtctagaaataatatcggtcttattcttaaaatctattcccttgatgaagggatcgttaatgaacaaatccttggcctttgattcggctgatctattatctccgttatagacgttacgttgactagtccaaagacttacaggaatagatgtatcgatgatgttgatactatgtgatatgtgagcaaagattgttctcttagtggcatcactatatgttccagtaatggcggaaaactttttagaaatgttatatataaaagaattttttcgtgttccaaacattagcagattagtatgaagataaacactcatattatcaggaacattatcaatttttacatacacatcagcatcttgaatagaaacgataccatcttctggaacctctacgatctcggcagactccggataaccagtcggtgggccatcgctaacaataactagatcatccaacaatctactcacatatgcatctatataatctttttcatcttgtgagtaccctggatacgaaataaatttattatccgtatttccataataaggtttagtataaacagagagagatgttgccgcatgaacttcagttacagtcgccgttggttggtttatttgacctattactctcctaggtttctctataaacgatggtttaatttgtacattcttaaccatatatccaataaagctcaattcaggaacataaacaaattctttgttgaacgtttcaaagtcgaacgaagagtcacgaataacgatatcggatactggattgaaggttaccgttacggtaatttttgaatcggatagtttaagactgctgaatgtatcttccacatcaaacggagttttaatataaacgtatactgtagatggttctttaatagtgtcattaggagttaggccaatagaaatatcattaagttcactagaatatccagagtgtttcaaagcaattgtattattgatacaattattatataattcttcgccctcaatttcccaaataacaccgttacacgaagagatagatacgtgattaatacatttatatccaacatatggtacgtaactgaatcttcccatacctttaacttctggaagttccaaactcagaaccaaatgattaagcgcagtaatatactgatccctaatttcgaagctagcgatagcctgattgtctggaccatcgtttgtcataactccggatagagaaatatattgcggcatatataaagttggaatttgactatcgactgcgaagacattagaccgtttaatagagtcatccccaccgatcaaagaattaatgatagtattattcattttctatttaaaatggaaaaagcttacaataaactccgtagagaaatatctataatttgtgagttttccttaaagtaacagcttccgtaaacgccgtctttatctcttagtaggtttattgtatttatgaccttttccttatcttcatagaatactaaaggcaacaaagaaatttttggttcttctctaagagctacgtgagacttaaccatagaagccaacgaatccctacatattttagaacagaaataccctacttcaccacccttgtatgtctcaatactaataggtctaaaaaccaaatcttgattacaaaaccaacacttatcaattacactatttgtcttaatagacacatctgccatagatttataatactttggtagtatacaagcgagtgcttcttctttagcgggcttaaagactgctttaggtgctgaaataaccacatctggaaggcttactcgcttagccatttaattacggaactatttttttatacttctaatgagcaagtagaaaacctctcatctacaaaaacgtactcgtgtccataatcctctaccatagttacacgttttttagatctcatatgtgctaaaaagttttcccatactaattggttactattatttttcgtataatttttaacagtttgaggttttagatttttagttacagaagtgatatcgaatattttatccaaaaagaatgaataattaattgtcttagaaggagtgttttcttggcaaaagaataccaagtgcttaaatatttctactacttcattaatcttttctgtactcagattcagtttctcatcttttacttgattgattatttcaaagactaacttataatcctttttatttattctctcgttagccttaagaaaactagatacaaaatttgcatctacatcatccgtggatatttgatttttttccatgatatccaagagttccgagataatttctccagaacattgatgagacaataatctccgcaatacatttctcaaatgaataagtttattagacacgtggaagtttgactttttttgtacctttgtacatttttgaaataccgactcgcaaaaaatacaatattcatatccttgttcagatactataccgttatgtctacaaccgctacataatcgtagattcatgttaacactctacgtatctcgtcgtccaatattttatataaaaacattttatttctagacgttgccagaaaatcctgtaatatttttagttttttgggctgtgaataaagtatcgccctaatattgttaccgtcttccgccaatatagtagttaaattatccgcacatgcagaagaacaccgcttaggcggattcagtacaatgttatatttttcgtaccaactcatttaaatatcataatctaaaatagttctgtaatatgtctagcgctaatatattgatcataatcctgtgcataaattaagatacaacaatgtctcgaaatcatcgacatggcttcttccatagttagaagatcgtcgtcaaagttagcaacgtgattcatcaacatttgctgttttgaggcagcaaatactgaaccgtcgccattcaaccattcataaaaaccatcgtctgaatccattgataatttcttgtactggtttttgagagctcgcatcaatctagcatttctagctcccggattgaaaacagaaagaggatcgtacatccagggtccattttctgtaaatagaatcgtataatgtcccttcaagaagatatcagacgatccacaatcaaagaattggtctccgagtttgtaacaaactgcggactttaacctatacatgataccgtttagcataatttctggtgatacgtcaatcggagtatcatctattagagatctaaagccggtgtaacattctccaccaaacatattcttattctgacgtcgttctacataaaacatcattgctccattaacgataacaggggaatgaacagcactacccatcacattagttcccaatggatcaatgtgtgtaactccagaacatcttccatagcctatgttaggaggagcgaacaccactcttccactattgccatcgaatgccatagaataaatatccttggaattgatagaaatcggactgtcggatgttgtgatcatcttcataggattaacaactatgtatggtgccgcctgaagtttcatatcgtaactgatgccgtttataggtctagccacagaaaccaacgtaggtctaaatccaactatagacaaaatagaagccaatatctgttcctcatctgtcataacttgagagcatccagtatgaataatcttcattagatggggatctaccgcatcatcatcgttacaataaaaaattcccattctaatgttcataattgcttttctaatcatggtatgcatgtttgctctctgaatctctgtggaaattagatctgatacacctgtaatcactatcggattatcctccgtaagacgattaaccaacaacatataattataagactttacttttctaaattcataaagttgctggattaggctataggtgtctccatgtacatacgcgttctcgagcgcaggaagtttaataccgaatagtgccatcagaataggatgaatatagtaattagtttctggttttctataaataaaagacaaatcttgtgaactagacatatcggtaaaatgcatggattggaatcgtgtagtcgacagaagaatatgatgattagatggagagtatattttatctaactctttgagttggtcaccgattctaggactagctcgagaatgaataagtactaaaggatgagtacatttcacagaaacactagcattgttcaatgtgctctttacatgggtaaggagttgaaatagctcgtttctatttgttctgacaatatttagtttattcataatgttaagcatatcctgaatagtaaagttagatgtgtcatacttgttagtagttagatatttagcaattgcattcccatcatttctcaatctcgtactccaatcatgcgtggatgctacttcgtcgatggaaaccatacaatcctttttgataggctgttgagattgattatttcctgcacgtttaggtttggtacgttgatttctagcccctgcggatataaagtcatcgtctacaatttgggacaatgaattgcatacactacaagacaaagatttatcagaagtgtgaatatgatcttcatctaccaaagaaagagtttgattagtataactagattttagtcctgcgttagatgttaaaaaaacatcgctattgaccacggcttccattatttatattcgtagtttttactcgaaagcgtgattttaatatccaatcttattacttttggaatcgttcaaaacctttgactaattgtagaatttgatctattgccctacgcgtatactcccttgcatcatatacgttcgtcaccagatcgtttgtttcggcctgaagttggtgcatatctctttcaacattcgacatgagatccttaagggccatatcgtctagattttgttgagatgctgctcctggatttggattttgttgtgctgttgtacatactgtaccaccagtaggtgtaggagtacatacagtggccacaataggaggttgaggaggtgtaaccgttggagtagtacaagaaatatttccatccgattgttgtgtacatgtagttgttggtaacgtctgagaaggttgggtagatggcggtgtcgtcgtcttttgatctttattaaatttagagataatatcctgaacagcattgctcggcgtcaacgctggaaggagtgaactcgccggcgcatcagtatctgcagacagccaatcaaaaagattagacatatcagatgatgtattagtttgttgtcgtggttttggtgtaggagcagtactactaggtagaagaataggagccggtgtagctgttggaaccggctgtggagttatatgaatagttggttgtagcggttggataggctgtctgctggcggccatcatattatctctagctagttgttctcgcaactgtctttgataatacgactcttgagactttagtcctatttcaatcgcttcatcctttttcgtatccggatccttttcttcagaataatagattgacgactttggtgtagaggattctgccagcctctgtgagaacttgttaaagaagtccatttaaggctttaaaattgaattgcgattataagattaaatggcagacacagacgatattatcgactatgaatccgatgatctcaccgaatacgaggatgatgaagaagaggaagaagatggagagtcactagaaactagtgatatagatcccaaatcttcttataagattgtagaatcagcatccactcatatagaagatgcgcattccaatcttaaacatatagggaatcatatatctgctcttaaacgacgctatactagacgtataagtctatttgaaatagcgggtataatagcagaaagctataacttgcttcaacgaggaagattacctctagtttcagaattttctgacgaaacgatgaagcaaaatatgctacatgtaattatacaagagatagaggagggttcttgtcctatagtcatcgaaaagaacggagaattgttgtcggtaaacgattttgacaaagatggtctaaaattccatctagactatattatcaaaatttggaaacttcaaaaacgatattagaatttatacgaatatcgttctctaaatgtcacaatcaagtctcgcatgttcagcaatttattgtcgtactttatatcgtgttcattaacgatattttgcaaaatagtaatgattctatcttccttcgatagatattcttcagagattattgtcttatattctttcttgttatccgatatgaatttgataagactttgaacattattgatacccgtctgtttaattttttctacagatattttagttttggcagattctatcgtatctgtcaatagacatccaacatcgacattcgacgtcaattgtctataaatcaacgtataaattttagaaataacattagcgaattgttgtgcattgatgtcgttattctgaaacagtatgattttaggtagcattttcttaacaaagagaacgtatttattgttactcagttgaacagatgatatatccagattactaacgcatctgattccgtataccaaactttcagaagaaatggtatacaattgtttgtattcattcaatgtctctttttcagaaattagtttagagtcgaatactgcaataattttcaagagatagttttcatcagataagattttatttagtgtagatatgataaaactattgttttgttggagaacttgatacgccgcgttctctgtagtcgacgctctcaaatgggaaacaatctccattatttttttggaatcggatactatatcttcggtatcttgacgcagtctagtatacatagagttaagagagattagagtttgtacattaagcaacatgtctctaaatgtggctacaaacttttcctttttcacatcatctagtttattatataccgatttcacaacggcaccagatttaaggaaccagaatgaaaaactctgataactacaatatttcatcatagttacgattttatcatcttctatagttggtgtaatagcgcatacctttttctccaagactggaaccaacgtcataaaaatgtttaaatcaaaatccatatcaacatctgatgcgctaagaccagtctcgcgttcaagattatctttactaatggtgacgaactcatcgtataaaactctaagtttgtccattatttatttacagatttagttgtttaatttatttgtgctcttccagagttgggatagtatttttctaacgtcggtattatattattaggatctacgttcatatgtatcataatattaatcatccacgttttgataaatctatctttagcttctgaaataacgtatttaaacaaaggagaaaaatatttagctacggcatcagacgcaataacattttttgtaaatgtaacgtatttagacgacagatcttcgttaaaaagttttccatctatgtagaatccatcggttgttaacaccattcccgcgtcagattgaataggagtttgaatagtttgttttggaaatagatccttcaataacttatagttgggtgggaaaaaatcgattttatcactagactctttcttttttactatcattacctcatgaactatttcttgaatgagtatatgtattttctttcctatatcggacgcgttcattggaaaatataccatgtcgttaactataagaatatttttatcctcgtttacaaactgaataatatcagatgtagttcgtaaacgaactatatcatcaccagcacaacatctaactatatgatatccactagtttcctttagccgtttattatcttgttccatattagcagtcattccatcatttaagaaggcgtcaaagataatagggagaaatgacattttggattctgttacgactttaccaaaattaaggatatacggacttactatctttttctcaacgtcaatttgatgaacacacgatgaaaatgtgcttctatgagattgatcatgtagaaaacaacaagggatacaatatttccgcatatcatgaaatatattaagaaatcccaccttattatatttccccaaaggatccatgcacgtaaacattatgccgttatcattaataaagacttctttctcatcggatctgtaaaagttgttactgatttttttcattccaggatctagataattaataatgatgggttttctattcttattctttgtattttggcatatcctagaccagtaaacagtttccactttggtaaaatcagcagacttttgaacgctattaaacatggcattaatggcaataactaaaaatgtaaaatatttttctatgttaggaatatggtttttcactttaatagatatatggtttttggccaaaatgatagatatttttttatccgaggatagtaaaatattattagtcgccgtctctataaaaatgaagctagtctcgatatccaattttattctagaattgataggagtcgccaaatgtaccttatacgttatatctcccttgatgcgttccatttgtgtatctatatcggacacaagatctgtaaatagttttacgttattaatcatcacggtatcgccgtcgctagataacgctaatgtaccatccaagtcccaaatggagagatttaactgttcatcgtttagaataaaatgattaccggtcatattaataaagtgttcatcgtatctagataacaacgacttataattaatgtccaagtcttgaactcgctgaatgatcttttttaacccagttagttttagattggtacgaaatatattgttaaactttgattctacagtaatgtccaaatctagttgtggaaatacttccatcaacattgtttcaaacttgataatattattatctacatcttcgtacgatccaaattccggaatagatgtatcgcacgctctggccacccagataaccaaaaagtcacacgctccaggatatacattgtataaaaagctatcgttttttagtagggtttttttctgcgtgtatacgaagggattaaaaatagtattatcaacgtaactatattccaaattattcttatgagaatagataataatatcgtccttaatatctaacaaatttcctaaatatccctttaattgagtcattcgaagcgtcaatagaatatgtctcttaactatttccggctgttgtatatttaaatgacttcgtaaaaaataatatatgggcgacttctcatctatgtaatcatatggagtgagatatagggctcgttctacctcctgccccttacccacctgtaataccaattgcggacttactatatatcgcatatttatatcgtggggtaaagtgaaaatctactaccgatgatgtaagtcttacaatgttcgaaccagtaccagatcttaatttggaggcctccgtagaactaggggaggtaaatatagatcaaacaacacctatgataaaggagaatagcggttttatatcccgcagtagacgtctattcgcccatagatctaaggatgatgagagaaaactagcactacgattctttttacaaagactttattttttagatcatagagagattcattatttgttcagatgcgttgacgctgtaaaagacgtcactattaccaaaaaaaataacattatcgtggcgccttatatagcacttttaactatcgcatcaaaaggatgcaaacttacagaaacaatgattgaagcattctttccagaactatataatgaacatagtaagaaatttaaattcaactctcaagtatccatcatccaagaaaaactcggataccagtttggaaactatcacgtttatgattttgaaccgtattactctacagtagctctggctattcgagatgaacattcatctggcatttttaatatccgtcaagagagttatctggtaagttcattatctgaaataacatatagattttatctaattaatctaaaatctgatcttgttcaatggagtgctagtacgggcgctgtaattaatcaaatggtaaatactgtattgattacagtgtatgaaaagttacaactggtcatagaaaatgattcacaatttacatgttcattggctgtggaatcaaaacttccaataaaattacttaaagatagaaatgaattatttacaaaattcattaacgagttaaaaaagaccagttcattcaagataagcaaacgcgataaggatacgctactaaaatattttacttaggactggagttagaatttatagacgactcatttcgtttatcattgttactattattactattactatcattattagtgttggcattattagtattcttcttgtcatcttgttcagaaatatacagcaatgctatacctaatactaaatacattatcatgctcgcaatggctctaacaacaacgaaccaaaatgaatttggtcgtagcttttgttcacaaaaatacataaagaaatgtctacataaatctatggcgccattggctacttgaaatagcgccagtcctcctacagattttaatatagctgtataacatgacatttattcatcatcaaaagagacagagtcaccatctgtcatatttagattttttttcatgtgttcaaagtatcctctactcatttcattataatagtttatcatacttagaattttaggacggatcaatgagtaagacttgactagatcgtcagtagtaatttgtgcatcgtctattctgcatccgcttcgtcgaataatgtatagcatcgctttgagattctccatagctatcaagtctttatacaatgacatggaaatatctgtgaatactttatacttctccaacatcgatgccttaacatcatcgcctactttagcattgaaaatacgttctattgtgtagatggatgtagcaagatttttaaacaacaatgccatcttacacgatgattgcctcaagtctccaatcgtttgtttagaacgattagctacagagtccaatgcttggctgactagcatattattatctttagaaattgtattcttcaatgaggcgtttatcatatctgtgatttcgttagtcatattacagtctgactgggttgtaatgttatccaacatatcacctatggatacggtacacgtaccagcatttgtaataatcctatctaagatgttgtatggcattgcgcagaaaatatcttctcctgtaatatctccactctcgataaatctactcagattattcttaaatgccttattctctggagaaaagatatcagtgtccatcatttcattaatagtatacgcagaaaagataccacgagtatcaattctatccaagatacttatcggttccgagtcacagataatggtttcctctccttcgggagatcctgcatagaaatatctaggacaatagtttctatactgtctgtaactctgataatctctaaagtcactaactgataccatgaaattgagaagatcaaacgctgaagtaattaatttttctgcctcgtttttactacaactagttttcatcaatgtagtgacgatgtattgtttagttacttttggtctaatactgatgatagagatattattgcttcccataatggatcttctagtagtcaccttaaagcccattgatgcgaatagcagatagataaagtcttggtatgactcctttctaatatagtacggactacctttgtcacccaactttatacccacataagccataacaacctctttaatagccgtttcatgaggtttatcagccatgagcctgagtagttggaagaatctcatgaatcccgtctcagaaagtcctatatgcatgatagatttatctttcctgggaaactctcgtatagtcatagatgaaatactctttaaagtttctgaaataagattagtaacagtcttacctccgactactctaggtaacaaacaaactctaataggtgttttctctgcggagataatatcagaaaggatagagcaataagtagtattattgtgattataaagaccgaatacataacaggtagaatttataaacatcatgtcctgaaggtttttagacttgtattcctcgtaatccataccgtcccaaaacatggatttggtaactttgatagccgtagatctttgttccttcgccaacaggttaaagaaattaataaagaatttgttgtttctatttatgtccacaaattgcacgtttggaagcgccacggttacattcactgcagcattttgaggatcgcgagtatgaagtacgatgttattgtttactggtatatctggaaagaaatctaccagtctaggaataagagattgatatcgcatagaaatagtaaagtttataatctcatcatcgaagagcattttgttaccattgtaataaatatccactctgtcatatgtataaatgaagtactgttcaaacatgatgagatgtttatatgttggcatagtagtgagatcgacgtttggtaatggcaatgtattaagattaactccataatgtctagcagcatctgcgatgttataagcgtcgtcaaagcggggtcgatcttgtattgttatatattgtctaacacctataagattatcaaaatcttgtctgcttaatacaccgttaacaatttttgccttgaattcttttattggtgcattaataacatccttatagaggatgttaaacaaataagtgttatcaaagttaagatctggatatttcttttctgctagaacatccattgagtcggagccatctggtttaatataaccaccgataaatctagctctgtattctgtatccgtcaatctaatattaagaaggtgttgagtgaaaggtggaagatcgtaaaagctgtgagtattaatgataggattagtttccgaactaatgttaattggggtattaataatatctatatttccagcgttaagtgtaacattaaacagttttaattcacgtgacgtggtatcaattaaataattaatgcccaatttggatatagcagcctgaagctcatcttgtttagttacggatcctaatgagttattaagcaatatatcgaacggatgaacgaaggttgttttaagttggtcacatactttgtaatctagacatagatgcggaagaacggtagaaactatacgaaataaatattcagagtcctctaattgatcaagagtaactattgacttaataggcatcatttatttagtattaaatgacgaccgtaccagtgacggatatacaaaacgatttaattacagagttttcagaagataattatccatctaacaaaaattatgaaataactcttcgtcaaatgtctattctaactcacgttaacaacgtggtagatagagaacataatgccgccgtagtgtcatctccagaggaaatatcctcacaacttaatgaagatctatttccagatgatgattcaccggccactattatcgaacgagtacaacctcatactactattattgacgatactccacctcctacgtttcgtagagagttattaatatcggaacaacgtcaacaacgagaaaaaagatttaatattacagtatcgaaaaatgctgaagcaataatggaatctagatctatgataacttctataccaacacaaacaccatccttgggagtagtttatgataaagataaaagaattcagatgttagaggatgaagtggttaatcttagaaatcaacgatctaatacaaaatcatctgataatttagataattttaccaaaatactatttggtaagactccgtacaaatcaacagaagttaataagcgtatagccatcgttaattatgcaaatttgaacgggtcccccttatcagtcgaggacttggatgtttgttcggaggatgaaatagatagaatctataaaacgattaaacaatatcacgaaagtagaaaacgaaaaattatcgtcactaacgtgattattattgtcataaacattatcgagcaggcattgctaaaactcggatttgaagaaatcaaaggactgagtaccgatatcacttcagaaattatcgatgtggagatcggagatgactgcgatgctgtagcatctaaactaggaatcggtaacagtccggttcttaatattgtattgtttatactcaagatattcgttaaacgaattaaaattatttaatttaatacattcccatatccagacaacaatcgtctggattaatctgttcctgtcgtctcataccggacgacatattaatctttttattagtgggcatctttttagatggtttctttttcccagcattaactgagtcgatacctagaagatcgtgattgatctctccgaccattccacgaacttctaattggccgtctctgacggtaccataaactattttaccagcattagtaacagcttggacaatctgaccatccatcgcattgtacgatgtagtagtaactgttgttctacgtctaggagcaccagaagtatttttggagcccttggatgttgatgtagaagaagacgaggattttgattttggtttacatgtaatacattttgaactctttgattttgtatcacatgcgccggcagtcacatctgtttgagaattaagattattgttgcctcctttgacggctgcatctccaccgatttgcgctagtagatttttaagctgtggtgtaatcttattaactgtttcgatataatcatcgtaactgcttctaacggctaaattttttttatccgccatttagaagctaaaaatatttttatttatgcagaagatttaactagattatacaatgaactaatatgatccttttccagattatttacaaacttggtattttttggttctggaggaggcgaatttaaattcggacttggattcggattttgtaagttcttgatcttattatacatcgagtataggatggcgacagtaactgctacacaaataccgatcaaaagaagaataccaatcatttattgacaataacttcactattgatcaagtatgcaatatatcatcttttcactaaataagtagtaataatgattcaacaatgtcgagatatatggacgataataatttagttcatggaaatatcgctatgattggtgtgaatgactccgctaactctgtggggtgcgcagtgctttccccacatagaataaattagcattccgactgtgataataataccaagtataaacgccataatactcaatactttccatgtacgagtgggactggtagacttactaaagtcaataaaggcgaagatacacgaaagaatcaaaagaatgattccagcgattagcacgccggaaaaataatttccaatcataagcatcatgtccatttaactaataaaaattttaaatcgccgaatgaacaaagtggaatataaaccatataaaaacaatagtttgtactgcaaaaataatatctatttttgttttcgaagatatggtaaaattaaatagtagtacacagcatgttataactaacagcagcaacggctcgtaattacttatcatttactagacgaaaaggtggtgggatattttcttgctcaaataatacgaatatatcacccatccattttatgcgatgtttatatactctaatctttaatagatctatagacgacgggtttaccaacaatatagattttatcgattcatctaatttaaacccttccttaaacgtgaatgatctattatctggcataacgatgaccctacctgatgaatcggacaatgtactgggccatgtagaataaattatcaacgaattatcgtctacgaacatttatatcatttgttttaattttaggacgcgaataaatggatataaaatagaaaataacagatattacaaccagtgttatggccgcgcccaaccaggtaggcagttttattttatcttttactacaggttctcctggatgtacgtcaccaacggcggacgtagttctagtacaattagacgtaagttccgcttgggaattttttaacgctaaagagttaacgttaatcgtgcacccaacgtatttacatctagttcgttgaacatcttgattataatataaccattttctatctctagattcgtcagtgcactcatgtaaccaacataccctaggtcctaaatatttatctccggaattagattttggataattcgcgcaccaacaatttctatttcctttatgatcgttacaaaagacgtataatgccgtatccccaaaagtaaaataatcaggacgaataattctaataaactcagaacaatatctcgcatccatatgtttggagcaaatatcggaataagtagacatagccggtttccgttttgcacgtaaccattctaaacaattggggtttccaggatcgtttctacaaaatccagtcatgaaatcgtcacaatgttctgtcttgtaattattattaaatatttttggacagtgtttggtatttgtcttagaacaacattttgccacgctatcactatcgcccaggagataatccttttttataaaatgacatcgttgcccggatgctatataatcagtagcgtgttttaaatccttaatatattcaggagttacctcgttctgataatagattaatgatccaggacgaaatttgaaagaactacatggttctccatgaattaatacatattgtttagcaaattcaggaactataaaactactacaatgatctatcgacataccatctatcaaacaaaacttgggtttaatttctcccggagatgtttcataatagtacgtataactttcttctgcaaacttaacagctctattatattcaggataattaaaacctaattccatatatttgtctcgtatatctgctattcctggtgctattttgattctattaagagtaacagctgcccccattcttaataatcgtcagtatttaaactgttaaatgttggtatatcaacatctaccttatttcccgcagtataaggtttgttgcaggtatactgttcaggaatggttacatttatacttcttctatagtcctgtctttcgatgttcatcacatatgcaaagaacagaataaacaaaataatgtaagaaataatattaaatatctgtgaattcgtaaatacattgattgccataataattacagcagctacaatacatacaatagacattcccacagtgttgccattacctccacgatacatttgagttactaagcaataggtaataactaagctagtaagaggcaatagaaaagatgagataaatatcatcaatatagagattagaggagggctatatagagccaagacgaacaaaatcaaaccgagtaacgttctaacatcattatttttgaagattcccaaataatcattcattcctccataatcgttttgcatcatacctccatctttaggcataaacgattgctgctgttcctctgtaaataaatctttatcaagcactccagcacccgcagagaagtcgtcaagcatattgtaatatcttaaataactcatttatatattaaaaaatgtcactattaaagatggagtataatctttatgccgaactaaaaaaaatgacttgtggtcaacccctaagtctttttaacgaagacggggatttcgtagaagttgaaccgggatcatcctttaagtttctgatacctaagggattttacgcctctccttccgtaaagacgagtctagtattcgagacattaacaacgaccgataataaaatcactagtatcaatccaacaaatgcgccaaagttatatcctcttcaacgcaaagtcgtatctgaagtagtttctaatatgaggaaaatgatcgaatcaaaacgtcctctatacattactcttcacttggcgtgtggatttggtaagactattaccacgtgttatcttatggctacacacggtagaaaaaccgtcatttgcgtacccaataaaatgttaatacatcaatggaagacacaggtagaggcagtcggattggaacataagatatccatagatggagtaagtagtctattaaaggaactaaagactcaaagtccggatgtattaatagtagtcagtagacatctgacaaacgatgccttttgtaaatatatcaataagcattatgatttgttcatcttggatgaatcacatacgtataatctgatgaacaatacagcagttacaagatttttagcgtattatcctccgatgatgtgttattttttaactgctacacctagaccatctaaccgaatttattgtaacagtattattaatattgccaagttatccaatctaaaaaaaactatctatgcagtagatagtttttttgagccatattccacagataatattagacatatggtaaaacgactagatggaccatctaataaatatcatatatataccgagaagttattatctgtagacgagcctagaaatcaacttattcttgataccctggtagaagaattcaagtcaggaactattaatcgcattttagttattactaaactacgtgaacatatggtattattctacaaacgattattagattttttcggaccagaggttgtatttataggagacgcccaaaatagacgtactccagatatggtcaaatcaatcaaggaactaaatagatttatattcgtatccaccttattttattccggtactggtttagatattcctagtttggattcgttgttcatttgctcggcagtaatcaacaatatgcaaatagagcaattactagggagggtatgtcgagaaacagaactattagataggacggtatatgtatttcctaacacatccatcaaagaaataaagtacatgataggaaatttcatgcaacgaattattagtctgtctgtagataaactaggatttaaacaaaaaagttatcggaaacatcaagaatccgatcccacttctgcatgtacaacatcatccagagaagaacgtgtattaaatagaatatttaactcgcaaaatcgttaagaagtttaagcgacgatccgcatgctgcgcaggccagtgtattacccctcatagtattaatataatccaatgatacttttgtgatgtcggaaatcttaaccaatttagactgacaggcagaacacgtcatgcaatcatcatcgtcatcgataactgtagtcttgggcttctttttgcgactcttcattccggaacgcacattggtgctatccatttaggtagtaaaaaataagtcagaatatgccctataacacgatcgtgcaaaacctggtatatcgtctctatctttatcacaatatagtgtatcgacatttttattattattgacctcgtttatcttggaacatggaatgggaacatttttgttatcaacggccatctttgccttaattccagatgttgtaaaattataactaaacagtctatcatcgacacaaatgaaattcttgtttagacgtttgtagtttacgtatgcggctcgttcgcgtctcattttttcagatattgcaggtactataatattaaaaataagaatgaaataacataggattaaaaataaagttatcatgacttctagcgctgatttaactaacttaaaagaattacttagtctgtacaaaagtttgagattttcagattctgcggctatagaaaagtataattctttggtagaatggggaacatctacttactggaaaataggcgtgcaaaaggtagctaatgtcgagacgtcaatatctgattattatgatgaggtaaaaaataaaccgtttaatattgatccgggctattacattttcttaccggtatattttgggagcgtctttatttattcgaagggtaaaaatatggtagaacttggatctggaaactcttttcaaataccagatgatatgcgaagtgcgtgtaacaaagtattagacagcgataacggaatagactttctgagatttgttttgttaaacaatagatggataatggaagatgctatatcaaaatatcagtctccagttaatatatttaaactagctagtgagtacggattaaacatacccaaatatttagaaattgaaatagaggaagacacattatttgacgacgagttatactctattatagaacgctctttcgatgataaatttccaaaaatatccatatcgtatattaagttgggagaacttagacggcaagttgtagactttttcaaattctcattcatgtatattgagtccatcaaggtagatcgtataggagataatatttttattcctagcgttataacaaaatcaggaaaaaagatattagtaaaagatgtagaccatttaatacgatccaaggttagagaacatacatttgtaaaagtaaaaaagaaaaacacattttccattttatacgactatgatggaaacggaacagaaactagaggagaagtaataaaacgaattatagacactataggacgagactattatgttaacggaaagtatttctctaaggttggtagtgcaggcttaaagcaattgactaataaattagatattaatgagtgcgcaactgtcgatgagttagttgatgagattaataaatccggaactgtaaaacgaaaaataaaaaaccaatcagcatttgatttaagcagagaatgtttgggatatccagaagcggattttataacgttagttaataacatgcggttcaaaatagaaaattgtaaggttgtaaatttcaatattgaaaatactaattgtttaaataacccgagtattgaaactatatatggaaactttaaccagttcgtctcaatctttaatgtcgtcaccgatgtcaaaaaaagattattcgagtgaaataatatgcgcctttgatataggtgcaaaaaatcctgccagaactgttttagaagtcaaggataactccgttagggtattggatatatcaaaattagactggagttctgattgggaaaggcgcatagctaaagatttgtcacaatatgaatacactacagttcttctagaacgtcagcctagaaggtcgccgtatgttaaatttatctattttattaaaggctttttatatcatacatcggctgccaaagttatttgcgtctcgcctgtcatgtctggtaattcatatagagatcgaaaaaagagatcggtcgaagcatttcttgattggatggacacattcggattgcgagactccgttccggatagacgcaaattagacgatgtagcggatagtttcaatttggctatgagatacgtattagataaatggaatactaattatacaccttataataggtgtaaatctagaaattacataaaaaaaatgtaataacgttagtaacgccattatggataatctatttacctttctacatgaaatagaagatagatatgccagaactatttttaactttcatctaataagttgcgatgaaataggagatatatatggtcttatgaaagaacgcatttccttagaggatatgtttgataatatagtgtataataaagatatacatcctgccattaagaaactagtgtattgcgacatccaacttactaaacacattattaatcagaatacgtatccggtatttaacgattcttcacaagtgaaatgttgtcattatttcgacataaactcagataatagcaatattagctctcgtacagtagagatatttgagagggaaaagtcatctcttgtatcatatattaaaactaccaataagaagagaaaggtcaattacggcgaaataaagaaaactgttcatggaggcactaatgcaaattacttttccggtaaaaagtctgacgagtatctgagtactacagttagatccaacattaatcaaccttggatcaaaaccatctctaagaggatgagagttgatatcattaatcactctatagtaacgcgtggaaaaagctctatattacaaactatagaaattatttttactaatagaacatgtgtgaaaatattcaaggattctactatgcacattattctatccaaggacaaggatgaaaaggggtgtatacacatgattgacaaattattctatgtctattataatttatttctgttgttcgaagatatcatccaaaacgagtactttaaagaagtagctaatgttgtaaaccacgtactcacggctacggcattagatgagaaattattcctaattaagaaaatggctgaacacgatgtttatggagttagcaatttcaaaatagggatgtttaacctgacatttattaagtcgttggatcataccgttttcccctctctgttagatgaggatagcaaaataaagttttttaaggggaaaaagctcaatattgtagcattacgatctctggaggattgtataaattacgtgactaaatccgagaatatgatagaaatgatgaaggaaagatcgactattttaaatagcatagatatagaaacggaatcggtagatcgtctaaaagaattgcttctaaaatgaaaaaaaacactgattcagaaatggatcaacgactcggatataagtttttggtgcctgatcctaaagccggagttttttatagaccgttacatttccaatatgtatcgtattctaattttatattgcatcgattgcatgaaatcttgaccgtcaagcggccactcttatcgtttaagaataatacagaacgaattatgatagaaattagcaatgttaaagtgactcctccagattactcacctataatcgcgagtattaaaggtaagagttatgacgcattagccacgttcactgtaaatatctttaaagaggtaatgaccaaagagggtatatccatcactaaaataagtagttatgagggaaaagattctcatttgataaaaattccgctactaataggatacgggaataaaaatccacttgatacagccaagtatcttgttcctaatgtcataggtggagtctttatcaataaacaatctgtcgaaaaagtaggaattaatctagtagaaaagattacaacatggccaaaatttagggttgttaagccaaactcattcactttctcgttttcctccgtatcccctcctaatgtattaccgacaagatatcgccattacaagatatctctggatatatcacaattggaagcgttgaatatatcatcgacaaagacatttataacggtcaatattgttttgctgtctcaatatttatctagagtgagtctagaattcattagacgtagtttatcatacgatatgcctccagaagttgtctatctagtaaacgcgataatagatagtgctaaacgaattactgaatctattactgactttaatattgatacatacattaatgacctggtggaagctgaacacattaaacaaaaatctcagttaacgattaacgagttcaaatatgaaatgctgcataactttttacctcatatgaactatacacccgatcaactaaagggattttatatgatatctttactaagaaagtttctctactgtatcttccacacttctagatatccagatagagattcgatggtttgtcatcgcatcctaacgtacggcaaatattttgagacgttggcacatgatgaattagagaattacataggcaacatccgaaacgatatcatgaacaatcacaagaacagaggcacttacgcggtaaacattcatgtactaacaactcccggacttaatcacgcgttttctagcttattgagtggaaagttcaaaaagtcagacggtagttatcgaacacatcctcactattcatggatgcagaatatttctattcctaggagtgttggattttatccggatcaagtaaagatttcaaagatgttttctgtcagaaaataccatccaagtcaatatctttacttttgttcatcagacgttccggaaagaggtcctcaggtaggtttagtatctcaattgtctgtcttgagttccattacaaatatactaacgtctgagtatttggatttggaaaagaaaatttgtgagtatatcagatcatattataaagatgatataagttactttgaaacaggatttccaatcactatagaaaatgctctagtcgcatctcttaatccaaatatgatatgtgattttgtaactgactttagacgtagaaaacggatgggattcttcggtaacttggaggtaggtattactttagttagggatcacatgaatgaaattcgcattaatattggagcgggaagattagtcagaccattcttggttgtggataacggagagctcatgatggatgtgtgtccggagttagaaagcagattagacgacatgacattctctgacattcagaaagagtttccgcatgtcatcgaaatggtagatatagaacaatttacttttagtaacgtatgtgaatcggttcaaaaatttagaatgatgtcaaaggatgaaagaaagcaatacgatttatgtgactttcctgccgaatttagagatggatatgtagcatcttcactagtgggaatcaatcacaattctggacccagagctattcttggatgtgctcaagctaaacaagctatctcttgtctgagttcggatatacgaaataaaatagacaatggaattcatttgatgtatccagagaggccaatcgtgattagtaaggctttagaaacttcaaagattgcggctaattgcttcggccaacatgttactatagcattaatgtcgtacaaaggtatcaatcaagaggatggaattatcatcaaaaaacaatttattcagagaggcggtctcgatatagttaccgcaaagaaacatcaagtagaaattccattggaaaactttaataacaaagaaagagataggtctaacgcctattcaaaattagaaagtaatggattagttagactgaatgctttcttggaatccggagacgctatggcacgaaatatctcatcaagaactcttgaagatgattttgctagagataatcagattagcttcgatgtttccgagaaatataccgatatgtacaaatctcgcgttgaacgagtacaagtagaacttactgacaaagttaaggtacgagtattaaccatgaaagaaagaagacccattctaggagacaaatttaccactagaacgagtcaaaagggaacagtcgcgtatgtcgcggatgaaacggaacttccatacgacgaaaatggtatcacaccagatgtcattattaattctacatccatcttctctagaaaaactatatctatgttgatagaagttattttaacagccgcatattctgctaagccgtacaacaataagggagaaaaccgacctgtctgttttcctagtagtaacgaaacatccatcgatacatatatgcaattcgctaaacaatgttatgagcattcaaatccgaaattgtccgatgaagaattatcggataaaatcttttgtgaaaagattctctatgatcctgaaacggataagccttatgcatccaaagtattttttggaccaatttattacttgcgtctgaggcatttaactcaggacaaggcaaccgttagatgtagaggtaaaaagacgaagctcattagacaggcgaatgagggacgaaaacgtggaggaggtatcaagttcggagaaatggagagagactgtttaatagcgcatggtgcagccaatactattacagaagttttgaaagattcggaagaagattatcaagatgtgtatgtttgtgaaaattgtggagacatagcagcacaaatcaagggtattaatacatgtcttagatgttcaaaacttaatctctctcctctcttaacaaaaattgataccacgcacgtatctaaagtatttcttactcaaatgaacgccagaggcgtaaaagtcaaattagatttcgaacgaaggcctccttcgttttataaaccattagataaagttgatctcaagccgtcttttctggtgtaatattctagtttggtagtagatacatatcaatatcatcaaattcgagatccgaattataaaatgggcgtggattgttaactatagaatcggacgtctgatattcgaaaatctgtggagtttcaggttttggtggaggtgtaactgctacttgggatactgaagtctgatattcagaaagctgtggatgttctggttcggcatccaccgatggtgtcacatcactaatcggttcggtaacgtctgtggatggaggtgctacttctacagaacctgtagcctcagttgtcaacggagatacatttttaatgcgagaaaatgtataatttggtaatggtttcttatgtggatctgaagaagaggtaagatatctactagaaagataccgatcacgttctagttctcttttgtagaacttaactttttctttctccgcatctagttgatattccaacctcttcacgttactacgttcagattccaattcacgttcgcatgggttacctccgcagtttttacgagcgatttcacgttcagccttcatgcgtctctccctctctctatcgagtttatcagagcagtctttctgaaggcgatcgaactccataaatttctccaacgctttgattgtttccatagatttccgaagttcagcttttaggactgtgattctttttctttcgaattcacagctggatgtacaaccgtttccattaccgccatctctaagtttcttttctagatcggcaacatttcatccccatgccttttacattcctcgagtctactgtcgtcgaaatatcgttccagctccttttcgacatcaataactttagcacgttgtctctcaagctctcttttgtagttatctgattccctggcacgtttaagatcttcatgcaattgagtcagctcttaacttcctctcttgcttcttcgtcatagtacgcgcaatcactgtgagatccattgttaccacgtctacactcggcgagctcgcgtttaagagattcaatttcccgtttgtattggtccatgtttccattgctaccaccattagatttacaggctgctagttgtcgttcgagatcagaaatacgggttttcttggaattgatttcgtcgatgtacttggcatcgaaacacttattaagttctttttccaattctacgattttatttctttcgcgagtcaattccctcctgtagtaactatctgttttgtcagattcacgctctctacgtagactttcttgcaagttactaatttgttccctagcacgtccgagtttagttttatatgctgaatagagttctgattcatcctttgagcagatctctagcgatcgtttaagattcctaattctagtctttagcctatttacctcctcagaagatgttccgttaccgttgcgtttacactcgttaagctgtctatcaagatccatgattctatctctaagacgttgcatctctctttccatatcagcattgctttcattattacgtctgcagtcactcaactgtctttcaatatctgagattctatctctaagacgtcgcatctctctctgtttcggcattggtttcattattacgtctacagtcgttcaactgtctttcaagatctgatattctagattggagtctgctaatctctgtagcattttcacggcattcactcagttgtctttcaagatctgaaattttagattggagtctgctaatctctgtaagatttcctcctccgctctcgatgcagtcggtcaacttattctctagttctctaatacgcgaacgcagtgcatcaacttcttgcgtgtcttcctggttgcgtgtacattcatcgagtctagattcgagatctctaacgcgtcgtcgttcttcctcaagttctctgcgtactacagaaagcgtgtccctatcttgttgatatttagcaatttctgattctagagtactgattttgcttacgtagttactaatatttgtcttggccttatcaagatcctccttgtatttgtcgcattccttgatatccctacgaagtctggacagttcccattcgacattacgacgtttatcgatttcagctcggagatcgtcatcgcgttgttttagccacatacgactgagttcaagttctcgttgacaagatccatctacttttccattcctaatagtatccagttccttttctagttctgaacgcatttctcgttccctatcaagcgattctctcaattctcggatagtcttcttatcaatttctaataaatctgaaccatcatctgtcccattttgaatatccctgtgttctttgatctcttttgtaagtcggtcgattctttcggttttataaacagaatccctttccaaagtcctaatcttactgagtttatcactaagttctgcattcaattcggtgagttttctcttggcttcttccaactctgttttaaactctccactatttccgcattcttcctcgcatttatctaaccattcaattagtttattaataactagttggtaatcagcgattcctatagccgttcttgtaattgtgggaacataattaggatcttctaatggattgtatggcttgatagcatcatctttatcattattagggggatggacaaccttaattggttggtcctcatctcctccagtagcgtgtggttcttcaataccagtgttagtaataggcttaggcaaatgcttgtcgtacgcgggcacttcctcatccatcaagtatttataatcgggttctacttcagaatattcttttctaagagacgcgacttcgggagttagtagaagaactctgtttctgtatctatcaacgctggaatcaatactcaagttaaggatagcgaatacctcatcgtcatcatccgtatcttctgaaacaccatcatatgacatttcatgaagtctaacgtattgataaatagaatcagatttagtattaaacagatccttaacctttttagtaaacgcatatgtatattttagatctccagatttcataatatgatcacatgccttaaatgtcagtgcttccatgatataatctggaacactaatgggtgacgaaaaagatacagcaccatatgctacgttgataaataaatctgaaccactaagtagataatgattaatgttaagaaagaggaaatattcagtgtataggtatgtcttggcgtcatatcttgtactaaacacgctaaacagtttgttaatgtgatcaatttccaatagattaattagagcagcgggaataccaacaaacatattaccacatccgtattttctatgaatatcacatatcatgttaaaaaatcttgatagaagagcgaatatctcgtctgacttaatgagtcgtagttcagcagcaacataagtcataactgtaaatagaacatactttcctgtagtgttgattctagactccacatcaacaccattattaaaaatagttttatatacatctttaatctgctctccgttaatcgtcgaacgttctagtatacggaaacactttgatttcttatctgtagttaatgacttagtgatatcacgaagaatattacgaattacatttcttgtttttcttgagagacctgattcagaactcaactcatcgttccatagtttttctacctcagtggcgaaatctttggagtgcttggtacatttttcaataaggttcgtgacctccatttattataaaaaatttattcaaaacttaactacaatcgggtaattataaaatcgtagatctcccatgtggcggaatactaccatctatcgcatgtggatggacagtaggtaatggccatgggaacagtaatgtttgcatatttatctttcttgccagtattactgcatattgtcccaatgtttcgatgtgatgttctaacctatcaactgccgctgtatcacaacaatagtgtccgatgaaattaagattatgatccaatgtgtttaatatatgattatcaagtcttatacgatccgcgtcttttttgacaggatcaggttcttctacaggaagaagtttcggcctcttatgatattcatgtctgggaaacggtggtctagggtgaggctccggtatcggagtgggttttggattataatcatcatcgtctatgacatcatcttcgacttcgatatttattttgctatcttgatgatgtcctgtatcagttgcattttcagcactcgactgaatattagcgcattcattgtctattattaccatatttctaaacccaaaatgtatgtgttgaacatcagtactatcgttgatgagtcttatagcatgaattcgcttatcgttatcgggtttatcttctgtcaccttagcaattccttttttattaaactctacataatcatatccatttctattgtttgttctaatataaacgagtatagcatcattgctaaatttttcaatagtatcaaaaacagaatatcctaaaccatataatatatattcaggaacactcaaactaaatgtccaggattctcctaaatacgtaaactttaatagtgcgaaatcattcaaaaatctaccacttatagatagatagtacataaatgcgtatagtagtctacctatctctttattatgaaaaccggcattacgatcatatatgtcgtgatatacctgtgatccgtttacgttaaaccataaatacatgggtgatcctataaacatgaatttatttctaattctcagagctatagttaattgaccgtgtaatatttgcttacatgcatacttgatacgcttattaataagatttttatcattgctcgttatttcagaatcgtatatataaggagtaccatcgtgattcttaccagatattatacaaaatactatatataaaatatattgaccaacgttagtaatcatataaatgtttaacgttttaaattttgtattcaatgatccattatcatacgctagcatggtcttatgatattcattctttaaaatataatattgtgttagccattgcattggggctcctaatggagattttttattctcatccattttaggataggctttcataaagtccctaataacttcgtgaataatgtttctatgttttctactgatgcatgtatttgcttcgatttttttatcccatgtttcatctatcatagatttaaacgcagtaatgctcgcaacattaacatcttgaaccgttggtacaattccgttccataaatttataatgttcgccatttatataactcattttttgaatatacttttaattaacaaaagagttaagttactcatatggacgccgtccagtctgaacatcaatctttttagccagagatatcatagccgctcttagagtttcagcgtgattttccaacctaaatagaacttcatcgttgcgtttacaacacttttctatttgttcaaactttgttgttacattagtaatctttttttccaaattagttagccgttgtttgagagtttcctcattgtcgtctccatcggctttaacaattgcttcgcgtttagcctctggctttttagcagcctttgtagaaaaaaattcagttgctggaattgcaagatcgtcatctccggggaaaagagttccgtccatttaaagtacagattttagaaactgacactctgcgttatttatatttggtacaacacatggattataaatattgatgttaataacatcagaaaatgtaaagtctatacattgttgcatcgtgttaaattttctaatggatctagtattattgggtccaacttctgcctgaaatccaaatatggaagcggatacaaaaccgtttcctggataaaccacacatctccacttttgctttacatcagaaattgtgtcgttgacatcttgaactctcctatctaatgccggtgttccacctatagattttgaatattcgaatgctgcatgagtagcattaaattccttaatattgccataattttcatatattgagtaaccctggataaaaagtaaacacaccgcagccgtcgctaccacaataaaaaaaattgatagagagttcatttataatctattagaagctgacaaaatttttttacacgcatcagacaatgctttaataaatagttcaacatctacttttgtcatatcgaaccgatggtatgattctaacctagaattacatccgaaaaagttgactatgttcatagtcattaagtcattaacaaacaacattccagactctggattataagacgatactgtttcgtcacaattacctaccttaatcatgtgattatgaatattggctattagagcaccttctaagaaatctataatatctttgaaacacgatttaaaatcaaaccacgaatatacttctacgaagaaagttagtttacccataggagaaataactataaatggagatctaaatacaaaatccggatctatgatagttttaacattattatattctctattaaatacctccacatctaaaaatgttaattttgaaactatgtcttcgtttattaccgtacctgaactaaacgctataagctctattgtttgagaactctttaaacgatattcttgaaatacatgtaacaaagtttcctttaactcggtcggtttatctaccatagttacagaatttgtatccttatctataatataataatcaaaatcgtataaagttatataattatcgcgttcagattgggatcttttcaaatagactaaaaaccccatttctctagtaagtatcttatgtatatgtttgtaaaatatcttcatggtgggaatatgctctaccgcagttagccattcctcattgacagcggtagatgtattagacaaaactattccaatgtttaacaagggccattttacgagattattaaatccttgtttgataaatgtagccaatgagggttcgagttcaacgacgattgaattctcttcccgcggatgctgcatgatgaacgacgggatgttgttcgattgatttggaattctttttcgactttttgtttatattaaatattttaaaatttatagcggatagcaattcatgtaccacggataatgtagacgcgtattgcgcatcgatatctttattattagataaatttatcaataaatgtgagaagtttgcctcgttaaggtcttccatttaaatattatataaacatttgtgtttgtaacttattcgtcttttatggaatagttttttactagtaaagctgcaattacacactttgtccgtaaaacataaatataaacaccagcttttatcaatcgttccaaaaagtcgacggcggacatttttaacatggcatctattttaaatacacttaggtttttggaaaaaacatcattttataattgtaacgattcaataactaaagaaaagattaagattaaacataagggaatgtcatttgtattttataagccaaagcattctaccgttgttaaatacttgtctggaggaggtatatatcatgatgatttggttgtattggggaaggtaacaattaataatctaaagatgatgctattttacatggatttatcatatcatggagtgacaagtagtggagcaatttacaaattgggatcgtctatcgatagactttctctaaataggactattgttacaaaagttaataattatgatgatacattttttgacgacgatgattgatcgctattgcacaattttgtttttgtactttctaatatagtgtttaggttctttttcatatgagaatattgatttactaaaatatctatgtttaacttttgttctatgacgtccttatcggcggtatcggtacatatacgtaattcaccttcacaaaatacggagtcttcgataataatagccaatcgattattggatctagctgtctgtatcatattcaacatgtttaatatatcctttcgtttcccctttacaggcatcgatcgtagcatattttccgcgtctgatatggaaatgttaaaactacaaaaatgcgtaatgttagcccgtcctaatattggtacgtgtctataagtttggcatagtagaataatagacgtgtttaaatgccttccaaagtttaagaattctattagagtattgcattttgatagtttatcgcctacatcatcaaaaataagtaaaaagtgtgctgattttttatgattttgtgcgacagcaatacatttttctatgttacttttagttcgtatcagattatattctagagattcctgactactaacgaaattaatatgatttggccaaatgtatccatcataatctgggttataaacgggtgtaaacaagaatatatgtttatattttttaactagtgtagaaaacagagatagtaaatagatagtttttccagatccagatcctcctgttaaaaccattctaaacggcatttttaataaattttctcttgaaaattgtttttcttggaaacaattcataattatatttacagttactaaattaatttgataataaatcaaaatatggaaaactaaggttgttagtagggaggagaacaaagaaggcacatcgtgatataaataacatttattatcatgatgacaccagaaaacgacgaagagcagacatctgtgttctccgctactgtttacggagacaaaattcagggaaagaataaacgcaaacgcgtgattggtctatgtattagaatatctatggttatttcactactatctatgattaccatgtccgcgtttctcatagtgcgcctaaatcaatgcatgtctgctaacgaggctgctattactgacgccgctgttgccgttgctgctgcatcatctactcatagaaaggttgcgtctagcactacgcaatatgatcacaaagaaagctgtaatggtttatattaccagggttcttgttatatattacattcagactaccagttattctcggatgctaaagcaaattgcactgcggaatcatcaacactacccaataaatccgatgtcttgactacctggctcattgattatgttgaggatacatggggatctgatggtaatccaattacaaaaactacatccgattatcaagattctgatgtatcacaagaagttagaaagtatttttgtgttaaaacaatgaactaatatttatttttgtacattaataaatgaaatcgcttaatagacaaactgtaagtaggtttaagaagttgtcggtgccggccgctataatgatgatactctcaaccattattagtggcataggaacatttctgcattacaaagaagaactgatgcctagtgcttgcgccaatggatggatacaatacgataaacattgttatttagatactaacattaaaatgtctacagataatgcggtttatcagtgtcgtaaattacgagctagattgcctagacctgatactagacatctgagagtattgtttagtattttttataaagattattgggtaagtttaaaaaagaccaatgataaatggttagatattaataatgataaagatatagatattagtaaattaacaaattttaaacaactaaacagtacgacggatgctgaagcgtgttatatatacaagtctggaaaactggttaaaacagtatgtaaaagtactcaatctgtactatgtgttaaaaaattctacaagtgacaacaaaaaatgaattaataataagtcgttaacgtacgccgccatggacgccgcgtttgttattactccaatgggtgtgttgactataacagatacattgtatgatgatctcgatatctcaatcatggactttataggaccatacattataggtaacataaaaactgtccaaatagatgtacgggatataaaatattccgacatgcaaaaatgctactttagctataagggtaaaatagttcctcaggattctaatgatttggctagattcaacatttatagcatttgtgccgcatacagatcaaaaaataccatcatcatagcatgcgactatgatatcatgttagatatagaagataaacatcagccattttatctattcccatctattgatgtttttaacgctacaatcatagaagcgtataacctgtatacagctggagattatcatctaatcatcaatccttcagataatctgaaaatgaaattgtcgtttaattcttcattctgcatatcagacggcaatggatggatcataattgatgggaaatgcaatagtaattttttatcataaaagttgtaaagtaaataataaaacaataaatattgaactagtagtacgtatattgagcaatcagaaatgatgctggtacctcttatcacggtgaccgtagttgcgggaacaatattagtatgttatatattatatatttgtaggaaaaagatacgtactgtctataatgacaataaaattatcatgacaaaattaaaaaagataaagagttctaattccagcaaatctagtaaatcaactgatagcgaatcagactgggaggatcactgtagtgctatggaacaaaacaatgacgtagataatatttctaggaatgagatattggacgatgatagcttcgctggtagtttaatatgggataacgaatccaatgttatggcgcctagcacagaacacatttacgatagtgttgctggaagcacgctgctaataaataatgatcgtaatgaacagactatttatcagaacactacagtagtaattaatgaaacggagactgttgaagtacttaatgaagataccaaacagaatcctaactattcatccaatcctttcgtaaattataataaaaccagtatttgtagcaagtcaaatccgtttattacagaacttaacaataaatttagtgagaataatccgtttagacgagcacatagcgatgattatcttaataagcaagaacaagatcatgaacacgatgatatagaatcatcggtcgtatcattggtgtgattagtttcctttttataaaattgaagtaatatttagtattattgctgccgtcacgttgtacaaatggagatattccctgtattcggcatttctaaaattagcaattttattgctaataatgactgtagatattatatagatacagaacatcaaaaaattatatctgatgagatcaatagacagatggatgaaacggtacttcttaccaacatcttaagcgtagaagttgtaaatgacaatgagatgtaccatcttattcctcatagattatcgacgattatactctgtattagttctgtcggaggatgtgttatctctatagataatgacgtcaatggcaaaaatattctaacctttcccattgatcatgctgtaatcatatccccactgagtaaatgtgtcgtagttagcaagggtcctacaaccatattggttgttaaagcggatatacctagcaaacgattggtaacatcgtttacaaacgacatactatatgtaaacaatctgtcactgattaattatttgccgttgtctgtattcattattagacgagtcaccgactatttggatagacacatatgcgatcagatatttgctaataataagtggtattcccttataaccatcgacgataagcaatatcctattccatcaaactgtataggtatgtcctctgccaagtacataaattctagcatcgagcaagatactttaatccatgtttgtaacctcgagcatccgttcgactcagtatacaaaaaaatgcagtcgtacaattctctacctatcaaggaacaaatattgtacggtagaattgataatataaatatgagcattagtatttctgtggattaatagatttctagtatggggatcattaatcatctctaatctctaaatacctcataaaacgaaaaaaaagctattatcaaatactgtacggaatggattcattctcttctctttttatgaaactctgttgtatatctactgataaaactggaagcaaaaaatctgatagaaagaataagaataagatcaaggattatatggaacacgattattataaaataacaatagttcctggttcctcttccacgtctactagctcgtggtattatacacatgcctagtaatagtctctttgcgttgacggaaagcagactagaaataacaggctaaaatgttcagacaccataatagttcccaacccagataataacagagttccatcaacacattcctttaaactcaatcccaaacccaaaaccgttaaaatgtatccggccaattgatagtagataatgaggtgtacagcgcatgataatttacacagtaaccaaaatgaaaacactttagtaattataagaaatatagacggtaatgtcatcatcaacaatccgataatatgcctgagagtaaacattgatggataaaacaaaaatgctccgcataactctatcatggcaataacacaaccaaacacttgtaaaattcctaaattagtagaaaatacaacgaatatcgatgtataagtgatctcgagaaataataagaataaagtaatgcccgtaaagataaacatcaacattgtttggtaatcattaaaccaattagtatgaagttgaactaatttcacagtagattttattccagtgttatcctcgcatgtataagtacctggtaagatatctttatattccataatcaatgagacatcactatctgataacgaatgaagtctagcactagtatgccatttacttaatattgtcgtcttggaagttttattataagttaaaatatcatggttatccaatttccatctaatatactttgtcggattatctatagtacacggaataatgatggtatcattacatgctgtatactctatggtctttgtagttgttataacaaccaacgtatagaggtatatcaacgatattctaactcttgacattttttatttatttaaaatgatacctttgttatttattttattctattttgctaacggtattgaatggcataagtttgaaacgagtgaagaaataatttctacttacttattagacgacgtattatacacgggtgttaatggggcggtatacacattttcaaataataaactaaacaaaactggtttaactaataataattatataacaacatctataaaagtagaggatgcggataaggatacattagtatgcggaaccaataacggaaatcccaaatgttggaaaatagacggttcagacgacccaaaacatagaggtagaggatacgctccttatcaaaatagcaaagtaacgataatcagtcacaacggatgtgtactatctgacataaacatatcaaaagaaggaattaaacgatggagaagatttgacggaccatgtggttatgatttattcacggcggataacgtaattccaaaagatggtttacgaggagcattcgtcgataaagacggtacttatgacaaagtttacattcttttcactgatactatcggctcaaagagaattgtcaaaattccgtatatagcacaaatgtgcctaaacgacgaaggtggtccatcatcattgtctagtcatagatggtcgacgtttctcaaagtcgaattagaatgtgatatcgacggaagaagttatagacaaattattcattctagaactataaaaacagataatgatacgatactatatgtattcttcgatagtccttattccaagtccgcattatgtacctattctatgaataccattaaacaatctttttctacgtcaaaattggaaggatatacaaagcaattgccgtctccagctcctggtatatgtttaccagctggaaaagttgttccacataccacgtttgaagtcatagaacaatataatgtactagatgatattataaagcctttatctaaccaacctatcttcgaaggaccgtctggtgttaaatggttcgatataaaggagaaggaaaatgaacatcgggaatatagaatatacttcataaaagaaaattctatatattcgttcgatacaaaatctaaacaaactcgtagctcgcaagtcgatgcgcgactattttcagtaatggtaactgcgaaaccgttatttatagcagatatagggataggagtaggaatgccacaaatgaaaaaaatacttaaaatgtaatcttaatcgagtacaccacacgacaatgaacaaacataagacagattatgctggttatgcttgctgcgtaatatgcggtctaattgtcggaattatttttacagcgacactattaaaagttgtagaacgtaaattagttcatacaccattaatagataaaacgataaaagatgcatatattagagaagattgtcctactgactggataagctataataataaatgtatccatttatctactgatcgaaaaacctgggaggaaggacgtaatgcatgcaaagctctaaattcaaattcggatctaattaagatagagactccaaacgagttaagttttttaagaagccttagacgaggctattgggtaggagaatccgaaatattaaaccagacaaccccatataattttatagctaagaatgccacgaagaatggaactaaaaaacggaaatatatttgtagcacaacgaatactcccaaactgcattcgtgttacactatataacaattacactacatttttatcataccactacttcggttagatgttttagaaaaaaataaatatcgccgtaccgttcttgtttttataaaaataacaattaacaattatcaaattttttctttaatattttacgtggttgaccattcttggtggtaaaataatctcttagtgttggaatggaatgctgtttaatgtttccacactcatcgtatattttgacgtatgtagtcacatcgtttacgcaatagtcagactgtagttctatcatgcttcctacatcagaaggaggaacagttttaaagtctcttggttttaatctattaccgttagttttcatgaaatcctttgttttatccacttcacattttaaataaatgtccactatacattcttttgttaattttactagatcgtcatgggtcatagaatttataggttccgtagtccatggatccaaactagcaaacttcgcgtatacggtatcgcgattagtgtatacaccaactgtatgaaaattaagaaaacagtttaataaatcaacagaaatatttaatcctccgtttgatacagatgcgccatatttatggatttcggattcacacgttgtttgtctgaggtgttcgtctagtgttgcttctacgtaaacttcgattcccatatattctttattgtcagaatcgcataccgatttatcatcatacactgtttgaaaactaaatggtatacacatcaaaataataaataataacgagtacattctgcaatattgttatcgtaattggaaaaatagtgttcgagtgagttggattatgtgagtattggattgtatattttattttatattttgtaataagaataaaatgctaatgtcaagtttattccaatagatgtcttattaaaaacatatataataaataacaatggctgaatggcataaaattatcgaggatatctcaaaaaataataagttcgaggatgccgccatcgttgattacaagactacaaagaatgttctagctgctattcctaacagaacatttgccaagattaatccgggtgaaattattcctctcatcactaatcgtaatattctaaaacctcttattggtcagaaatattgtattgtatatactaactctctaatggatgagaacacgtatgctatggagttgcttactgggtacgcccctgtatctccgatcgttatagcgagaactcataccgcacttatatttttgatgggtaagccaacaacatccagacgtgacgtgtatagaacgtgtagagatcacgctacccgtgtacgtgcaactggtaattaaaataaaaagtaatattcatatgtagtgtcaattttaaatgatgatgatgaaatggataatatccatattgacgatgtcaataatgccggtattggcatacagttcatcgatttttagatttcattcagaggatgtggaattatgttatgggcatttgtattttgataggatctataatgtagtaaatataaaatataatccgcatattccatatagatataattttattaatcgcacgttaaccgtagatgaactagacgataatgtcttttttacacatggttattttttaaaacacaaatatggttcacttaatcctagtttgattgtctcattatcaggaaacttaaaatataatgatatacaatgctcagtaaatgtatcgtgtctcattaaaaatttggcaacgagtacatctactatattaacatctaaacataagacttattctctacatcggtccacgtgtattactataataggatacgattctattatatggtataaagatataaatgacaagtataatgacatctatgattttactgcaatatgtatgctaatagcgtctacattgatagtgaccatatacgtgtttaaaaaaataaaaatgaactcttaattatgctatgctattagaaatggataaaatcaaaattacggttgattcaaaaattggtaatgttgttaccatatcgtataacttggaaaagataactattgatgtcacacctaaaaagaaaaaagaaaaggatgtattattagcgcaatcagttgctgtcgaagaggcaaaagatgtcaaggtagaagaaaaaaatattatcgatattgaagatgacgatgatatggatgtagaaagcgcgtaatacgatctataaaaataagtatataaatactttttatttactgtactcttactgtgtagtggtgataccctactcgattatttttttaaaaaaaaaatacttattctgattcttctagccatttccgtgttcgtttgaatgccacatcgacgtcaaagataggggagtagttgaaatctagttctgcattgttggtacgcacctcaaatgtagtgttggatatcttcaacgtatagttgttgagtagtgatggttttctaaatagaattctcttcatatcattcttgcacgcgtacatttttagcatccatcttggaatcctagatccttgttctattcccaatggtttcatcaatagaagattaaacatatcgtacgaacacgatggagagtaatcgtagcaaaagtaagcatttcctttaatctcagatcccggatactggatatattttgcagccaacacgtgcatccatgcaacatttcctacatatacccggctatgcaccgcgtcatcatcgactgtacgatacataatgttaccgtgttgcttacattgctcgtaaaagactttcatcaatttgtctccttctccgtaaattccagtgggtcttaggcaacaagtatacaattttgctccattcatgattacggaattattggctttcataaccagttgctcggccatacgtttactttttgcgtatacatgtcctggtgatatatcataaagggtatgctcatggccgatgaatggatcaccgtgtttattgggtcctattgcttccatgctactagtatagatcaaatacttgattcctaggtccacacaagctgccaaaatagtctgtgttccataatagtttactttcatgatttcattatcggtgtattttccaaatacatccactagagcagccgtatgaataatcagatttaccccatctagcgcttctctcaccttatcaaagtcgtttatatcacattgtatatagtttataaccttaactttcgaggttattggttgtggatcttctacaatatctatgactctgatttcttgaacatcatctgcactaattaacagttttactatatacctgcctagaaatccggcaccaccagtaaccgcgtacacggccattgctgccactcataatatcagactacttattctattttactaaataatggctgtttgtataatagaccacgataatatcagaggagttatttactttgaaccagtccatggaaaagataaagttttaggatcagttattggattaaaatccggaacgtatagtttgataattcatcgttacggagatattagtcaaggatgtgattccataggcagtccagaaatatttatcggtaacatctttgtaaacagatatggtgtagcatatgtttatttagatacagatgtaaatatatttacaattattggaaaggcgttatctatttcaaaaaatgatcagagattagcgtgtggagttattggtatttcttacataaatgaaaagataatacattttcttacaattaacgagaatggcgtttgatatatcagttaatgcgtctaaaacaataaatgcattagtttacttttctactcagcaaaataaattagtcatacgtaatgaagttaatgatacacactacactgtcgaatttgatagggacaaagtagttgacacgtttatttcatataatagacataatgacaccatagaaataagaggggtgcttccagaggaaactaatattggttgcgcggttaatacgccggttagtatgacttacttgtataataagtatagttttaaactgattttagcagaatatataagacacagaaatactatatccggcaatatttattcggcattgatgacactagatgatttggctattaaacagtatggagacattgatctattatttaatgagaaacttaaagtagactccgattcgggactatttgactttgtcaactttgtaaaggatatgatatgttgtgattctagaatagtagtagctctatctagtctagtatctaaacattgggaattgacaaataaaaaatataggtgtatggcattagccgaacatatatctgatagtattccaatatctgagctatctagactacgatacaatctatgtaagtatctacgcgggcacactgagagcatagaggatgaatttgattattttgaagacgatgattcgtctacatgttctgccgtaaccgacagggaaacggatgtataatttttttttatagcgtgaaggatatgataaaaaatataattgttgtatttatcccattccaatcaccttatatgattctgtaacacaataaaggagtcttatagatgtatagaggtcagatactggtttgataaactgtttattccacataagtatgtttgactttatggttagacccgcatactttaacaaatcactgaaaattggagttaggtattgacctctcagaatcagttgccgttctggaacattaaatgtattttttatgatatactccaacgcatttatgtgggcatacaacaagtcattactaatggagtattccaagagttttagttgtctagtatttaacaagagaagagatttcaacagactgtttatgaactcgaatgccgcctcattgtcgcttatattgatgatgtcgaattctcccaatatcatcaccgatgagtagctcatcttgttatcgggatccaagttttctaaagatgtcattaaaccctcgatcatgaatggatttatcatcatcgtttttatgttggacatgagcttagtccgtttgtccacatctatagacgacgatttctgaattatttcatatatccctctctttaactccaggaacttgtcaggatggtctactttaatatgttctcgtctaagagatgaaaatctttggatggttgtacgcgacttttctctaaaggatgacgttgcccaagatcctctcttaaatgaatccatcttatccttggacaagatggacagtctattttccttagatggtttaatatttttgttacccatgatctataaaggtagacctaatcgtctcggatgacctatatatttattttcagttttattatacgcataaattgtaaaaaatatgttaggtttacaaaaatgtctcgtggggcattaatcgtttttgaaggattggacaaatctggaaaaacaacacaatgtatgaacatcatggaatctataccggcaaacacgataaaatatcttaactttcctcagagatccactgtcactggaaagatgatagatgactatctaactcgtaaaaaaacctataatgatcatatagttaatctattattttgtgcaaatagatgggagtttgcatcttttatacaagaacaactagaacagggaattactttaatagttgatagatacgcattttctggagtagcgtatgccgccgctaaaggcgcgtcaatgactctcagtaagagttatgaatctggattgcctaaacccgacttagttatattcttggaatctggtagcaaagaaattaatagaaacgtcggcgaggaaatttatgaagatgttacattccaacaaaaggtattacaagaatataaaaaaatgattgaagaaggagatattcattggcaaattatttcttctgaattcgaggaagatgtaaagaaggagttgattaagaatatagttatagaggctatacacacggttactggaccagtggggcaactgtggatgtaatagtgaaattacattttttataaatagatgttagtacagtgttataaatggatgaagcatattactctggcaacttggaatcagtactcggatacgtgtccgatatgcataccgaactcgcatcaatatctcaattagttattgccaagatagaaactatagataatgatatattaaacaaggacattgtaaattttatcatgtgtagatcaaacttggataatccatttatctctttcctagatactgtatatactattatagatcaagagaactatcagactgagttgattaattcattagacgacaatgaaattatcgattgtatagttaataagtttatgagcttttataaggataacctagaaaatatagtagatgctatcattactctaaaatatataatgaataatccagattttaaaactacgtatgcagaagtactcggttccagaatagccgatatagatattaaacaagtgatacgtaagaatatactacaattgtctaatgatatccgcgaacgatatttgtgaaaatattaaaaaaaaatactttttttattaaatgacgtcgcttcgcgaatttagaaaattatgctgtgatatatatcacgcatcaggatataaagaaaaatctaaattaattagagactttataacagatagggatgataaatatttgatcattaagctattgcttcccggattagacgatagaatttataacatgaacgataaacaaattataaaattatatagtataatatttaaacaatctcaggaagatatgctacaagatttaggatacggatatataggagacactattaggactttcttcaaagagaacacagaaatccgtccacgagataaaagcattttaactttagaagaagtggatagttttttaactacgttatcatccgtaactaaagaatcgcatcaaataaaattattgactgatatcgcatccgtttgtacatgtaatgatttaaaatgtgtagtcatgcttattgataaagatctaaaaattaaagcgggtcctcggtacgtacttaacgctattagtcctaatgcctatgatgtgtttagaaaatctaataacttgaaagagataatagaaaatgcatctaaacaaaatctagactctatatctatttctgttatgactccaattaatcccatgttagcggaatcgtgtgattctgtcaataaggcgtttaaaaaatttccatcaggaatgtttgcggaagtcaaatacgatggtgaaagagtacaagttcataaaaataataacgagtttgccttctttagtagaaacatgaaaccagtactctctcataaagtggattatctcaaagaatacataccgaaagcatttaaaaaagctacgtctatcgtattggattctgaaattgttcttgtagacgaacataatgtaccgctcccgtttggaagtttaggaatacacaaaaagaaagaatataaaaactctaacatgtgtttgttcgtgtttgactgtttgtactttgatggattcgatatgacggacattccattgtacgaacgaagatcttttctcaaagatgttatggttgaaatacccaatagaatagtattctcagagttgacgaatattagtaacgagtctcagttaactgacgtattggatgatgcactaacgagaaaattagaaggattggtcttaaaagatattaatggagtatacgaaccgggaaagagaagatggttaaaaataaagcgagactatttgaacgagggttccatggcagattctgccgatttagtagtactaggtgcttactatggtaaaggagcaaagggtggtatcatggcagtctttctaatgggttgttacgacgatgaatccggtaaatggaagacggttaccaagtgttcaggacacgatgataatacgttaagggagttgcaagaccaattaaagatgattaaaattaacaaggatcccaaaaaaattccagagtggttagtagttaataaaatctatattcccgattttgtagtagaggatccgaaacaatctcagatatgggaaatttcaggagcagagtttacatcttccaagtcccataccgcaaatggaatatccattagatttcctagatttactaggataagagaggataaaacgtggaaagaatctactcatctaaacgatttagtaaacttgactaaatcttaatagttacatacaaactgaaaattaaaataacactatttagttggtggtcgccatggatggtgttattgtatactgtctaaacgcgctagtaaaacatggcgaggaaataaatcatataaaaaatgatttcatgattaaaccatgttgtgaaagagtttgtgaaaaagtcaagaacgttcacattggcggacaatctaaaaacaatacagtgattgcagatttgccatatctggataatgcggtatccgatgtatgcaattcactgtataaaaagaatgtatcaagaatatccagatttgctaatttgataaagatagatgacgatgacaagactcctactggtgtatataattattttaaacctaaagatgccattcctgttattatatccataggaaaggatagagatgtttgtgaactattaatctcatcagacatatcgtgtgcatgcgtggagttaaattcatatcacgtagccattcttcccatggatgtttccttttttaccaaaggaaatgcatcattgattattctcctgtttgatttctctatcgatgcggcacctctcttaagaagtgtaaccgataataatgttattatatctagacaccagcgtatacatgacgagcttccgagttccaattggttcaagttttacataagtataaagtccgactattgttctatattatatatggttgttgatggatctgtgatgcatgcgatagctgataatagaactcacgcaattattagcaaaaatatattagacaatactacgattaacgatgagtgtagatgctgttattttgaaccacagattaggattcttgatagagatgagatgctcaatggatcatcgtgtgatatgaacagacattgtattatgatgaatttacctgatgtaggcgaatttggatctagtatgttggggaaatatgaacctgacatgattaagattgctctttcggtggctggtaatttaataagaaatcgagactacattcccgggagacgaggatatagctactacgtttacggtatagcctctagataatttttttaagcacgaaataaaaaacataattttaaaccaatctatttcatactattttgtgtgatcaccatggacataaagatagatattagtatttctggtgataaatttacggtgactactaggagggaaaatgaagaaagaaaaaaatatctacctctccaaaaagaaaaaactactgatgttatcaaacctgattatcttgagtacgatgacttgttagatagagatgagatgtttactattctagaggaatattttatgtacagaggtctattaggcctcagaataaaatatggacgactctttaacgaaattagaaaattcgacaatgatgcggaagaacaattcggtactatagaagaactcaagcagaaacttagattaaattctgaagagggagcagataactttatagattatataaaggtacaaaaacaggatatcgtcaaacttactgtatacgattgcatatctatgataggattgtgtgcatgcgtggtagatgtttggagaaatgagaaactgttttctagatggaaatattgtttacgagcgattaaactgtttattgatgatcacatgcttgataagataaaatctatactgcagaatagactagtatatgtggaaatgtcatagaaagttaaaagttaatgagagcaaaaatatataaggttgtattccatatttgttatttttttctgtaatagttagaaaaatacattcgatggtctatctatcagattattatgtgttataaggtactttttctcataataaactagagtatgagtaagatagtgtttttcaaaacatataaatctaaaattgatggatgagatatacagctattaatttcgaaaatatattttaatctgataactttaaacatggatttttgatggtggtttaacgttttaaaaaaagattttgttattgtagtatatgataatattaaaagatggatataaagaatttgctgactgcatgtactattttttacattactacattggctacggcagatatacctacttcgtcactgccacacgctccggtaaacggggcatgtgacgagggagaatatcttgataagaggcataatcaatgttgtaatcagtgtccacctggagaatttgccaaggtcagatgtagtggtagtgataacacaaaatgtgaacgctgcccacctcatacatataccgcaatccccaattactctaatggatgtcatcaatgtagaaaatgcccaacaggatcatttgataaggtaaagtgtaccggaacacagaacagtaaatgttcgtgtcttcctggttggtattgcgctactgattcttcacagactgaagattgtcgagattgtataccaaaaaggagatgtccatgcggatactttggtggaatagatgaacaaggaaatcctatttgtaaatcgtgttgtgttggtgaatattgcgactacctacgtaattatagacttgatccatttcctccatgcaaactatctaaatgtaattaattatgattttgatgataatgttaccatacattatatcgctacttggttagtgtattattcagtatgaagacctattaataattacttatcttttgacgatcttgttataattataatataaaaatacttatggcatagtaactcataattgctgacgcgataaattcgtaataatctgttttgttcaaaggaatctacaggcataaaaataaaaatataatttataatatactcttacagcgcgccatcatgaataacagcagtaaattaattgctgttattaatggatttagaaatagtggacgattttgtgatattaatatagttattaatgatgaaaggataaacgctcacagactcatcctatctggagcctccgaatatttttccattctgttttccaataattttatcgattctaatgaatacgaagttaatctaagtcatttagattatcaaagcgtaaacgatttgatcgattacatttatgggatacctttgagcctaactaacgataacgtgaaatatattctttcaaccgctgattttttacaaattggatctgctattacggagtgtgaaaattacatacttaaaaatctttgttctagaaactgtatcgatttctacatatacgctgataaatataataacaagaaaatagaatcagcgtcgtttaacacaatattacaaaatattttgagactcatcaacgatgaaaactttaaatacttaacagaggaatcaatgataaaaattttaagcgatgatatgttaaatataaaaaatgaggatttcgccccactaattctcattaaatggttagagagtactcaacaaccatgcaccgtcgagttacttaaatgcctcagaatatcattgctttccccacaagttataaaatcactttatagtcatcgactggttagttcaatctacgaatgtataacattcttaaacaatatagcattcttggatgaatcatttcctagataccatagcatcgagttgatatctatcggtataagtaattcgcatgataagatttccataaactgctacaatcataaaaaaaatacatgggaaatgatatcttcacgtagatataggtgtagtttcgcagtggccgtcctggataatattatttatatgatgggtggatatgatcagtccccgtatagaagttcaaaggttatagcgtacaatacatgtacaaattcttggatatatgatataccagagctaaaatatcctcgttctaattgtgggggactggctgatgacgaatacatttattgtataggcggcatacgcgatcaggattcatcgttgacatctagtattgatagatggaagccatcaaaaccatattggcagaagtatgctaaaatgcgcgaaccaaaatgtgatatgggggttgcgatgttaaacggattaatatatgttataggtggaatcgttaaaggtgacacgtgtaccgacgcactagagagtttatcagaagatggatggatgaagcatcaacgtcttccaataaaaatgtccaatatgtcgacgattgttcatgatggcaagatttatatatctggaggttacaacaatagtagtgtagttaatgtaatatcgaatttagtccttagctataattcgatatatgatgaatggaccaaattatcatcattaaacattcctagaattaatcccgctctatggtcagcgcataataaattatatgtaggaggaggaatatctgatgatgttcgaactaatacatctgaaacatacgacaaagaaaaagattgttggacattggataatggtcacgtgttaccacgcaattatataatgtataaatgcgaaccgattaaacataaatatccattggaaaaaacacagtacacgaatgattttctaaagtatttggaaagttttataggtagttgatagaacaaaatacataattttgtaaaaataaatcactttttatactaatatgacacgattaccaatacttttgttactaatatcattagtatacgctacaccttttcctcagacatctaaaaaaataggtgatgatgcaactctatcatgtaatcgaaataatacaaatgactacgttgttatgagtgcttggtataaggagcccaattccattattcttttagctgctaaaagcgacgtcttgtattttgataattataccaaggataaaatatcttacgactctccatacgatgatctagttacaactatcacaattaaatcattgactgctagagatgccggtacttatgtatgtgcattctttatgacatcgcctacaaatgacactgataaagtagattatgaagaatactccacagagttgattgtaaatacagatagtgaatcgactatagacataatactatctggatctacacattcaccggaaactagttctgagaaacctgattatatagataattctaattgctcgtcggtattcgaaatcgcgactccggaaccaattactgataatgtagaagatcatacagacaccgtcacatacactagtgatagcattaatacagtaagtgcatcatctggagaatccacaacagacgagactccggaaccaattactgataaagaagatcatacagttacagacactgtctcatacactacagtaagtacatcatctggaattgtcactactaaatcaaccaccgatgatacgtacaatgataatgatacagtaccaccaactactgtaggcggtagtacaacctctattagcaattataaaaccaaggactttgtagaaatatttggtattaccgcattaattatattgtcggccgtggcaatattctgtattacgtattatatatgtaataaacgttcacgtaaatacaaaacagagaacaaagtctagatttttgacttacataaatgtctgggatagtaaaatctatcatattgagcgggccatctggtttaggaaagacagccatagccaaaagactatgggaatatatttggatttgtggtgtcccataccactagatttcctcgtcctatggaacgagaaggtgtcgattaccattacgttaacagagaggccatctggaagggaatagccgccggaaactttctagaacatactgagtttttaggaaatatttacggaacttctaaaactgctgtgaatacagcggctattaataatcgtatttgtgtgatggatctaaacatcgatggcgttagaagtcttaaaaatacgtacctaatgccttactcggtgtatataagacctacctctcttaaaatggttgagaccaagcttcgttgtagaaacactgaagcggatgatgagattcatcgtcgtgtgatgttggcaaaaactgacatggatgaggcaggtgaagccggtctattcgacactattatcattgaagatgatgtgaatttagcatatagtaagttaattcagatactacaggaccgtattagaatgtattttaacactaattagagacttaagacttaaaacttgataattaataatataactcgtttttatatgtggctatttcaacgtctaatgtattagttaaatattaaaacttaccacgtaaaacttaaaatttaaaatgatatttcattgacagatagatcacacattatgaactttcaaggacttgtgttaactgacaattgcaaaaatcaatgggtcgttggaccattaataggaaaaggtggatttggtagtatttatactactaatgacaataattatgtagtaaaaatagagcccaaagctaacggatcattatttaccgaacaggcattttatactagagtacttaaaccatccgttatcgaagaatggaaaaaatctcacaatataaagcacgtaggtcttatcacgtgcaaggcatttggtctatacaaatccattaatgtggaatatcgattcttggtaattaatagattaggtgcagatctagatgcggtgatcagagccaataataatagattaccaaaaaggtcggtgatgttgatcggaatcgaaatcttaaataccatacaatttatgcacgagcaaggatattctcacggagatattaaagcgagtaatatagtcttggatcaaatagataagaataaattatatctagtggattacggattggtttctaaattcatgtctaatggcgaacatgttccatttataagaaatccaaataaaatggataacggtactctagaatttacacctatagattcgcataaaggatacgttgtatctagacgtggagatctagaaacacttggatattgtatgattagatggttgggaggtatcttgccatggactaagatatctgaaacaaagaattgtgcattagtaagtgccacaaaacagaaatatgttaacaatactgcgactttgttaatgaccagtttgcaatatgcacctagagaattgctgcaatatattaccatggtaaactctttgacatattttgaggaacccaattacgacaagtttcggcacatattaatgcagggtgtatattattaagtgtggtgtttggtcgataaaaattaaaaaataacttaatttattattgatctcgtgtgtacaaccgaaatcatggcgatgttttacgcacacgctctcggtgggtacgacgagaatcttcatgcctttcctggaatatcatcgactgttgccaatgatgtcaggaaatattctgttgtgttagtttataataacaagtatgacattgtaaaagacaaatatatgtggtgttacagtcaggtgaacaagagatatattggagcactgctgcctatgtttgagtgcaatgaatatctacaaattggagatccgatccatgatcaagaaggaaatcaaatctctatcatcacatatcgccacaaaaactactatgctctaagcggaatcgggtacgagagtctagacttgtgtttggaaggagtagggattcatcatcacgtacttgaaacaggaaacgctgtatatggaaaagttcaacatgattattctactatcaaagagaaggccaaagaaatgagtacacttagtccaggacctatcatcgattaccacgtctggataggagattgtatctgtcaagttactgctgtggacgtacatggaaaggaaattatgaaaatgagattcaaaaagggtgcggtgcttccgatcccaaatctggtaaaagttaaacttggggagaatgatacagaaaatctttcttctactatatcggcgacaccatcgaggtaaccacctctctggaagacagcgtgaataatgtactcatgaaacgtttggaaactatacgccatatgtggtctgttgtatatgatcattttgatattgtgaatggtaaagaatgctgttatgtgcatacgcatttgtctaatcaaaatcttataccgagtactgtaaaaacaaatttgtacatgaagactatgggatcatgcattcaaatggattccatggaagctctagagtatcttagcgaactgaaggaatcaggtggatggagtcccagaccagaaatgcaggaatttgaatatccagatggagtggaagacactgaatcaattgagagattggtagaggagttcttcaatagatcagaacttcaggctggtgaatcagtcaaatttggtaattctattaatgttaaacatacatctgtttcagctaagcaactaagaacacgtatacggcagcagcttccttctatactctcatcttttaccaacacaaagggtggatatttgttcattggagttgataataatacacacaaagtatttggattcacggtgggttacgactacctcagactgatagagaatgatatagaaaagcatatcaaaagactttgtgttgtgtatttctgtgagaagaaagaggacatcaagtacgcgtgtcgattcatcaaggtatataaacctggggatgaggctacctcgacatacgtgtgcgctatcaaagtggaaagatgctgttgtgctgtgtttgcagattggccagaatcatggtatatggatactaatggtatcaagaagtattctccagatgaatgggtgtcacatataaaattttaattaatgtaatagagaacaaataataaggttgtaatatcatatagacaataactaacaattaattagtaactgttatctcttttttaactaaccaactaactatatacctattaatacatcgtaattatagttcttaacatctattaatcattgattcgcttctttaattttttataaactaacattgttaattgaaaagggataacatgttacagaatataaattatatatggatttttttaaaaaggaaatacttgactggagtatatatttatctcttcattatatagcacgcgtgttttccaatttttccacatcccatataatacaggattataatctcgttcgaacatacgagaaagtggataaaacaatagttgattttttatctaggttgccaaatttattccatattttagaatatggggaaaatattctacatatttattctatggatgatgctaatacgaatattataattttttttctagatagagtattaaatattaataagaacgggtcatttatacacaatctcgggttatcatcatccattaatataaaagaatatgtatatcaattagttaataatgatcatccagataataggataagactaatgcttgaaaatggacgtagaacaagacattttttgtcctatatatcagatacagttaatatctatatatgtattttaataaatcatggattttatatagatgccgaagacagttacggttgtacattattacatagatgtatatatcactataagaaatcagaatcagaatcatacaatgaattaattaagatattgttaaataatggatcagatgtagataaaaaagatacgtacggaaacacaccttttatcctattatgtaaacacgatatcaacaacgtggaattgtttgagatatgtttagagaatgctaatatagactctgtagactttaatagatatacacctcttcattatgtctcatgtcgtaataaatatgattttgtaaagttattaatttctaaaggagcaaatgttaatgcgcgtaataaattcggaactactccattttattgtggaattatacacggtatctcgcttataaaactatatttggaatcagacacagagttagaaatagataatgaacatatagttcgtcatttaataatttttgatgctgttgaatctttagattatctattatccagaggagttattgatattaactatcgtactatatacaacgaaacatctatttacgacgctgtcagttataatgcgtataatacgttggtctatctattaaacaaaaatggtgattttgagacgattactactagtggatgtacatgtatttcggaagcagtcgcaaacaacaacaaaataataatggaagtactattgtctaaacgaccatctttgaaaattatgatacagtctatgatagcaattactaaacataaacagcataatgcagatttattgaaaatgtgtataaaatatactgcgtgtatgaccgattatgatactcttatagatgtacagtcgctacagcaatataaatggtatattttaagatgtttcgatgaaatagatatcatgaagagatgttatataaaaaataaaactgtattccaattagttttttgtatcaaagacattaatactttaatgagatacggtaaacatccttctttcgtgaaatgcactagtctcgacgtatacggaagtcgtgtacgtaatatcatagcatctattagatatcgtcagagattaattagtctattatccaagaagctggatcctggagataaatggtcgtgttttcctaacgaaataaaatataaaatattggaaaactttaacgataacgaactatccacatatctaaaaatcttataaacattattaaaatataaaatctaagtaggataaaatcacactacatcattgtttccttttagtgctcgacagtgtatactatttttaacgctcataaataaaaatgaaaacgatttccgttgttacgttgttatgcgtactacctgctgttgtttattcaacatgtactgtacccactatgaataacgctaaattaacgtctaccgaaacatcgtttaatgataaccagaaagttacgtttacatgtgatcagggatatcattctttggatccaaatgctgtctgtgaaacagataaatggaaatacgaaaatccatgcaaaaaaatgtgcacagtttctgattatgtctctgaactatataataaaccgctatacgaagtgaattccaccatgacactaagttgcaacggcgaaacaaaatattttcgttgcgaagaaaaaaatggaaatacttcttggaatgatactgttacgtgtcctaatgcggaatgtcaacctcttcaattagaacacggatcgtgtcaaccagttaaagaaaaatactcatttggggaatatatgactatcaactgtgatgttggatatgaggttattggtgcttcgtacataagttgtacagctaattcttggaatgttattccatcatgtcaacaaaaatgtgatatgccgtctctatctaacggattaatttccggatctacattttctatcggtggcgttatacatcttagttgtaaaagtggttttacactaacggggtctccatcatccacatgtatcgacggtaaatggaatcccatactcccaatatgtgtacgaactaacgaaaaatttgatccagtggatgatggtcccgacgatgagacagatttgagcaaactctcgaaagacgttgtacaatatgaacaagaaatagaatcgttagaagcaacttatcatataatcatagtggcgttgacaattatgggcgtcatatttttaatctccgttatagtattagtttgttcctgtgacaaaaataatgaccaatataagttccataaattgctaccgtaaatataaatccgttaaaataattaataatttaataacaaacaagtatcaaaagattaaagacttatagctagaatcaattgagatgtcttcttcagtggatgttgatatctacgatgccgttagagcatttttactcaggcactattataacaagagatttattgtgtatggaagaagtaacgccatattacataatatatacaggctatttacaagatgcgccgttataccgttcgatgatatagtacgtactatgccaaatgaatcacgtgttaaacaatgggtgatggatacacttaatggtataatgatgaatgaacgcgatattactgtaagcgttggcaccggaatactattcatggaaatgtttttcgattacaataaaaatagtatcaacaatcaactaatgtatgatataattaatagcgtatctataattctagctaatgagagatatagaagcgcttttaacgacgatggtatatacatccgtagaaatatgattaacaagttgtacggatacgcatctctaactactattggcacgatcgctggaggtgtttgttattatctgttgatgcatctagttagtttgtataaataattatttcaatatactagttaaaattttaagattttaaatgtataaaaaactaataacgtttttatttgtaataggtgcattagcatcctattcgaataatgagtacactccgtttaataaactgagtgtaaaactctatatagatggagtagataatatagaaaattcatatactgatgataataatgaattggtgttaaattttaaagagtacacaatttctattattacagagtcatgcgacgtcggatttgattccatagatatagatgttataaacgactataaaattattgatatgtataccattgactcgtctactattcaacgcagaggtcacacgtgtagaatatctaccaaattatcatgccattatgataagtacccttatattcacaaatatgatggtgatgagcgacaatattctattactgcagagggaaaatgctataaaggaataaaatatgaaataagtatgatcaacgatgatactctattgagaaaacatactcttaaaattggatctacttatatatttgatcgtcatggacatagtaatacatattattcaaaatatgatttttaaaaatttaaaatatattatcacttcagtgacagtagtcaaataacaaacaacaccatgagatatattataattctcgcagttttgttcattaatagtatacatgctaaaataactagttataagtttgaatccgtcaattttgattccaaaattgaatggactggggatggtctatacaatatatcccttaaaaattatggcatcaagacgtggcaaacaatgtatacaaatgtaccagaaggaacatacgacatatccgcatttccaaagaatgatttcgtatctttctgggttaaatttgaacaaggcgattataaagtggaagagtattgtacgggactatgcgtcgaagtaaaaattggaccaccgactgtaacattgactgaatacgacgaccatatcaatttgtacatcgagcatccgtatgctactagaggtagcaaaaagattcctatttacaaacgcggtgacatgtgtgatatctacttgttgtatacggctaacttcacattcggagattctaaagaaccagtaccatatgatatcgatgactacgattgcacgtctacaggttgcagcatagactttgtcacaacagaaaaagtgtgcgtgacagcacagggagccacagaagggtttctcgaaaaaattactccatggagttcgaaagtatgtctgacacctaaaaagagtgtatatacatgcgcaattagatccaaagaagatgttcccaatttcaaggacaaaatggccagagttatcaagagaaaatttaatacacagtctcaatcttatttaactaaatttctcggtagcacatcaaatgatgttaccacttttcttagcatgcttaacttgactaaatattcataactaatttttattaatgatacaaaaacgaaataaaactgcatattatacactggttaacgcccttataggctctaaccattttcaagatgaggtccctgattatagtccttctgttcccctctatcatctactccatgtctattagacgatgtgagaagactgaagaggaaacatggggattgaaaatagggttgtgtataattgccaaagatttctatcccgaaagaactgattgcagtgttcatctcccaactgcaagtgaaggattgataactgaaggcaatggattcagggatatacgaaacaccgataaattataaaaaaagcaatgtgtccgctgtttccgttaataatactattttcgtaactggcggattattcataaataactctaatagcacgatcgtggttaacaatatggaaaaacttgacatttataaagacaaacaatggtcgattatagaaatgcctatggctagggtatatcacggcatcgactcgacatttggaatgttatattttgccggaggtctatccgttaccgaacaatatggtaatttagagaaaaacaacgagatatcttgttacaatcctagaacgaataagtggtttgatatttcatatactatttataagatatccatatcatcattgtgtaaactaaataacgtcttctatgtatttagtaaggacattggatatgtggaaaagtatgatggtgcatggaagttagtacatgatcgtctccccgctataaaggcattatcaacttctccttattgattgaaaatgaaaatataaatagtttttatgtatagcagtattaccctatagttttattgcttactactaacatggatacagatgttacaaatgtagaagatatcataaatgaaatagatagagagaaagaagaaatactaaaaaatgtagaaattgaaaataataaaaacattaacaagaatcatccaagtggatatattagagaagcactcgttattaatactagtagtaatagtgattccattgataaagaagttatagaatgtatctgtcacgatgtaggaatatagatcatatctactaatttttataatcgatacaaaacataaaaaacaactcgttattacatagcaggcatggaatccttcaagtattgttttgataacgatggcaagaaatggattatcggaaatactttatattctggtaattcaatactctataaggtcagaaaaaatttcactagttcgttctacaattacgtaatgaagatagatcacaaatcacacaagccattgttgtctgaaatacgattctatatatctgtattggatcctttgactatcgacaactggacacgggaacgtggtataaagtatttggctattccagatctgtatggaattggagaaaccgatgattatatgttcttcgttataaagaattcgggaagagtattcgccccaaaggatactgaatcagtcttcgaagcatgcgtcactatgataaacacgttagagtttatacactctcaaggatttacccatggaaaaatagaaccgaggaatatactgattagaaataaacgtctttcactaattgactattctagaactaacaaactatacaagagtggaaactcacatatagattacaacgaggacatgataacttcaggaaatatcaattatatgtgtgtagacaatcatcttggagcaacagtttcaagacgaggagatttagaaatgttgggatattgcatgatagaatggttcggtggcaaacttccatggaaaaacgaaagtagtataaaagtaataaaacaaaaaaaagaatataaaaaatttatagctactttctttgaggactgttttcctgaaggaaatgaacctctggaattagttagatatatagaattagtatacacgttagattattctcaaactcctaattatgacagactacgtaaactgtttatacaagattgaaattatattcttttttttatagagtgtggtagtgttacggatatctaatattaatattagactatctctatcgcgctacacgaccaatatcgattactatggatatcttctatgaaaggagagaatgtatttatttctccagcgtcaatctcgtcagtattgacaatactgtattatggagctaatggatccactgctgaacagctatcaaaatatgtagaaacggaggagaacacggataaggttagcgctcagaatatctcattcaaatccatgaataaagtatatgggcgatattctgccgtgtttaaagattcctttttgagaaaaattggcgataagtttcaaactgttgacttcactgattgtcgcactatagatgcaatcaacaagtgtgtagatatctttactgaggggaaaatcaatccactattggatgaaccattgtctcctagcaattagtgccgtatactttaaagcaaaatggttgacgccattcgaaaaggaatttaccagtgattatcccttttacgtatctccgacggaaatggtagacgtaagtatgatgtctatgtacggcaaggcatttaatcacgcatctgtaaaagaatcattcggcaacttttcaatcatagaactgccatatgttggagatactagtatgatggtcattcttccagacaagattgatggattagaatccatagaacaaaatctaacagatacaaattttaagaaatggtgtgactttatggatgctatgtttatagatgttcacattcccaagtttaaggtaacaggctcgtataatctggtggatactctagtaaagtcaggactgacagaggtgttcggttcaactggagattatagcaatatgtgtaatttagatgtgagtgtcgacgctatgatccacaaaacgtatatagatgtcaatgaagagtatacagaagcagctgcagcaacttctgtactagtggcagactgtgcatcaacaattacaaatgagttctgtgcagatcatccgttcatctatgtgattaggcatgttgatggaaaaattcttttcgttggtagatattgctctccgacaactaattgttaaccattttttttaaaaaaaatagaaaaaacatgtggtattagtgcaggtcgttgttcttccaattgcaattggtaagatgacggccaactttagtacccacgtcttttcaccacagcactgtggatgtgacagactgaccagtattgatgacgtcaaacaatgtttgactgaatatatttattggtcgtcctatgcataccgcaacaggcaatgcgctggacaattgtattccacactcctctcttttagagatgatgcggaattagtgttcatcgacattcgcgagctggtaaaaaatatgccgtgggatgatgtcaaagattgtacagaaatcatccgttgttatataccggatgagcaaaaaaccatcagagagatttcggccatcatcggactttgtgcatatgctgctacttactggggaggtgaagaccatcccactagtaacagtctgaacgcattgtttgtgatgcttgagatgctaaattacgtggattataacatcatattccggcgtatgaattgatgagttgtacatcttgacattttctttcttctcttctccctttcttctcttctcccttcctccctcttctccctttcccagaaacaaacttttttacccactataaaataaaatgagtatactacctgttatatttctttctatatttttttattcttcattcgttcagacttttaacgcgtctgaatgtatcgacaaagggcaatattttgcatcattcatggagttagaaaacgagccagtaatcttaccatgtcctcaaataaatacgctatcatccggatataatatattagatattttatgggaaaaacgaggagcggataatgatagaattataccgatagataatggtagcaatatgctaattctgaacccgacacaatcagactctggtatttatatatgcattaccacgaacgaaacctactgtgacatgatgtcgttaaatttgacaatcgtgtctgtctcagaatcaaatatagattttatctcgtatccacaaatagtaaatgagagatctactggcgaaatggtatgtcccaatattaatgcatttattgctagtaacgtaaacgcagatattatatggagcggacatcgacgccttagaaataagagacttaaacaacggacacctggaattattaccatagaagatgttagaaaaaatgatgctggttattatacatgtgttttagaatatatatacggtggcaaaacatataacgtaaccagaattgtaaaattagaggtacgggataaaataataccttctactatgcaattaccagatggcattgtaacttcaataggtagtaatttgactattgcatcgttgagacctcccacaacggatgcagacgtcttttggataagtaatggtatgtattacgaagaagatgatggggacggaaacggtagaataagtgtagcaaataaaatctatatgaccgataagagacgtgttattacatcccggttaaacattaatcctgtcaaggaagaagatgctacaacgtttacgtgtatggcgtttactattcctagcatcagcaaaacagttactgttagtataacgtgaatgtatgttgttacatttccatgtcaattgagtttataagaatttttatacattatcttccaacaaacaattgacgaacgtattgctatgattaactcccacgatactatgcatattattaatcattaacttgcagactatacctagtgctattttgacatactcatgttcttgtgtaattgcggtatctatattattaaagtacgtaaatctagctatagttttattatttaattttagataatataccgtctccttatttttaaaaattgccacatcctttattaaatcatgaatgggaatttctatgtcatcgttagtatattgtgaacaacaagagcagatatctataggaaagggtggaatgcgatacattgatctatgtagttttaaaacacacgcgaactttgaagaatttatataaatcattccatcgatacatccttctatgttgagatgtatatatccaggaattcgtttattaatatcgggaaatgtataaactaaaacattgcccgaaagcggtgcctctatctgcgttatatccgttcttaacttacaaaatgtaaccaatacctttgcatgacttgttttgttcggcaacgttagtttaaacttgacgaatggattaattacaatagcatgatccgcgcatctattaagtttttttactttaacgcccttgtatgtttttacagagactttatctaaatttctagtgcttgtatgtgttataaatataacgggatatagaaccgaatcacctaccttagatacccaattacattttatcagatccagataataaacaaattttgtcgccctaactaattctatattgttatatattttacaattggttatgatatcatgtaataacttggagtctaacgcgcatcgtcgtacgtttatacaattgtgatttagtgtagtatatctacacatgtatttttccgcactatagtattctggactagtgataaaactatcgttatatctatcttcaatgaactcatcgagatattgctctctgtcatattcatacacctgcataaactttctagacatcttacaatccgtgttattttaggatcatatttacatatttacgggtatatcaaagatgttagattagttaatgggaatcgtctataataatgaatattaaacaattatatgaggacttttaccacaaagcatcataaaaatgagtcgtcgtctgatttatgttttaaatatcaaccgcaaatcaactcataaaatacaagagaatgaaatatatacatattttagtcattgcaatatagaccatacttctacagaacttgattttgtagttaaaaactatgatctaaacagacgacaacctgtaactgggtatactgcactacactgctatttgtataataattactttacaaacgatgtactgaagatattattaaatcatggagtggatgtaacgatgaaaaccagtagcggacgtatgcctgtttatatattgcttactagatgttgtaatatttcacatgatgtagtgatagatatgatagacaaagataaaaaccacttattacatagagactattccaacctattactagagtatataaaatctcgttacatgttattaaaggaagaggatatcgatgagaacatagtatccactttattagataagggaatcgatcctaactttaaacaagacggatatacagcgttacattattattatttgtgtctcgcacacgtttataaaccaggtgagtgtagaaaaccgataacgataaaaaaggccaagcgaattatttctttgtttatacaacatggagctaatctaaacgcgttagataattgtggtaatacaccattccatttgtatcttagtattgaaatgtgtaataatattcatatgactaaaatgctgttgacttttaatccgaatttcgaaatatgtaataatcatggattaacgcctatactatgttatataacttccgactacatacaacacgatattcttgttatgttaatacatcactatgaaacaaatgttggagaaatgccgatagatgagcgtcgtatgatcgtattcgagtttatcaaaacatattctacacgtccggcagattcgataacttatttgatgaataggtttaaaaatataaatatttatacccgctatgaaggaaagacattattacacgtagcatgtgaatataataatacacacgtaatagattatcttatacgtatcaacggagatataaatgcgttaaccgacaataacaaacacgctacacaactcattatagataacaaagaaaattccccatataccattaattgtttactgtatatacttagatatattgtagataagaatgtgataagatcgttggtggatcaacttccatctctacctatctttcgtcgcttatcatactagtcatatcctaaatgttgatcatattccaccaaatgattgtgaaagagattgagattaaatcgtctaacaaacaattagtttttatgacattaacatataataaataaattaatcattattgacttaacgatgacgaaagttatcatcatcttaggattcttgattattaatacaaattcattgtctatgaaatgtgaacaaggtgtctcatattataattcacaagaattaaagtgttgtaaactatgtaagccaggaacatattcagatcatcgatgtgataaatacagcgataccatttgtggacattgtccgagtgacacattcacgtcaatatataatcgttctccttggtgtcatagttgtagaggtccatgtggtactaatcgagtagaggtcacaccttgtacacctaccacaaatagaatctgtcattgtgactcgaatagttattgtctccttaaagcttctgatggtaactgtgttacatgtgctcctaaaacaaaatgtggtcgtgggtatggaaagaaaggagaagatgaaatgggtaataccatttgtaagaaatgtcggaagggtacttattcagatattgtatctgactctgatcaatgtaaaccaatgacaagataagacttactcgcatctactggatagacataaaatatcctcctcgtaataatgaaatataaatatacactaattattaatatcaataacaatcgagtattaatatataggtcatttttaaatcccttttgggttccgtcccaaacggcgtttcggtctgcgtcgccgccatggccatgccgagcctctccgcgtgctcctccatcgaggacgacttcaactatggcagctcggtggcgtctgccagcgtgcacatacgaatggcatttctaagaaaagtctacggtatcctttgtctacaatttcttttaacaacggcaacaactgcagtatttttatactttgactgcatgcggacatttatacaagggagtcctgttctaatattggcatcaatgttcggatctataggcttgattttcgcattgactttacacagacataaacatcccctgaatctgtacctgctttgtggatttacactgtcggaatctctaacgctggcctctgttgttactttctatgatgtgcatgtcgttatgcaagctttcatgctgactactgcagcgtttcttgctctgactacatatactctacaatcaaagagagatttcagtaaacttggagcaggattgtttgctgctttgtggattttaattttgtcaggactcttggggatatttgtgcaaaatgagacagtggagctggtcctgtctgcttttggggcccttgtattctgtggattcattatctatgacacgcactcactaatacataagctctcgcctgaagagtatgtgttagcctctatcaatctctacttggatatcatcaatctgttcttgcatctgttgcagcttttggaagtatctaataagaaataaagtttaaaatagaattaataaaaacatataggtcattttttaaacatggattggaaaccaaggtagttagttaatacacacaagatatatttttttcacatcatccacccatgggtaacaccaaggttgttagttaataatatacaagatattttttctcactctgatccatgtaaaccaaggacgagataagacactctcattcctcatccacaacccattaaaaaaatggaaattaaagccctctattagcataaacggctacaggtctaccatcaggttaaccttcgtctaccttcacaatggcctttccttgtgcccagttcagaccctgtcattgccacgctactaaggactccctgaataccgtggccgacgtcagacattgtctgactgaatacatcctgtgggtttctcatagatggacccatagagaaagcgctcatctgttctccgtgtggtctcggaacatattctcacaccgtctcttccgcagataaatgcgaacccgtacccagaaatacctttaactatatcgatgtggaaattaatctgtatcccgtcaacgacacatcgtgtactcggacgaccactaccggtctcagcgaatccatctcaacgtcggaactaactattactatgaatcataaagactgtaatcccgtctttcgtgatggatacttctccgttcttaataaggtagcgacttcaggtttctttacaggagaaaggtgtgcactctgaatttcgagattaaatgcaataacaaagattcttcctccaaacagttaacgaaagcaaagaatgatactatcatgccgcattcggagacagtaactctagtgggcgacatctatatactatatagtaataccaatactcaagactacgaaactgatacaatctcttatcatgtgggtaatgttctcgatgtcgatagccatatgcccggtagttgcgatatacataaactgatcactaattccaaacccacccactttttatagtaagtttttcacccataaataataaatacaataattaatttctcgtaaaagtagaaaatatattctaatttattgcacggtaaggaagtagaatcataaagaacagtactcaatcaatagcaattatgaaacaatatatcgtcctggcatgcatgtgcctggcggcagctgctatgcctgccagtcttcagcaatcatcctcatcctcctcctcgtgtacggaagaagaaaacaaacatcatatgggaatcgatgttattatcaaagtcacaaagcaagaccaaacaccgaccaatgataagatttgccaatccgtaacggaaattacagagtccgagtcagatccagatcccgaggtggaatcagaagatgattccacatcagtcgaggatgtagatcctcctaccacttattactccatcatcggtggaggtctgagaatgaactttggattcaccaaatgtcctcagattaaatccatctcagaatccgctgatggaaacacagtgaatgctagattgtccagcgtgtccccaggacaaggtaaggactcatgaagaagctcttgctatgatcaaagactgtgaggtgtctatcgacatcagatgtagcgaagaagagaaagacagcgacatccagtactcgggtctaacatctctcataagaaagtgagttacgaagatatcatcggttcaacgatcgtcgatacaaaatgtgtcaagaatctagagtttagcgttcgtatcggagacatgtgcaaggaatcatctgaacttgaggtcaaggatggattcaagtatgtcgacggatcggcatctgaaggtgcaaccgatgatacttcactcatcgattcaacaaaactcaaagcgtgtgtctgaatcgataactctattcatctgaaattggatgagtagggttaatcgaacgattcaggcacaccacgaattaaaaaagtgtaccggacactatattccggtttgcaaaacaaaaatgttcttaactacattcacaaaaagttacctctcgcgacttcttctttttctgtctcaatagtgtgatacgattatgacactattcctattcctattcctatttcctttcagagtatcacaaaaatattaaacctctttctgatggtctcataaaaaaagttttacaaaaatatttttattctctttctctctttgatggtctcataaaaaaagttttacaaaaatatttttattctctttctctctttgatggtctcataaaaaaagttttacaaaaatatttttattctctttctctctttgatggtctcataaaaaaagttttacaaaaatatttttattctctttctctctttgatggtctcataaaaaaagttttacaaaaatatttttattctctttctctctttgatggtctcataaaaaaagttttacaaaaatatttttattctctttctctctttgatggtctcataaaaaaagttttacaaaaatatttttattctctttctctctttgatggtctcataaaaaaagttttacaaaaatatttttattctctttctctctttgatggtctcataaaaaaagttttacaaaaatatttttattctctttctctctttgatggtctcataaaaaaagttttacaaaaatatttttattctctttctctctttgatggtctcataaaaaaa

SEQ ID NO: 20 - protein, 193 aa, Homo sapiens
  Erythropoietin protein
  SIGNAL (1)...(27): Signal sequence
MGVHECPAWLWLLLSLLSLPLGLPVLGAPPRLICDSRVLERYLLEAKEAENITTGCAEHCSLNENITVPDTKVNFYAWKRMEVGQQAVEVWQGLALLSEAVLRGQALLVNSSQPWEPLQLHVDKAVSGLRSLTTLLRALGAQKEAISPPDAASAAPLRTITADTFRKLFRVYSNFLRGKLKLYTGEACRTGDR

SEQ ID NO: 21 - protein, 272 aa, Homo sapiens
  Anti-VEGF single chain antibody
  SIGNAL (1)...(20): Signal sequence
METDTLLLWVLLLWVPGSTGDEVQLVESGGGLVQPGGSLRLSCAASGFTISDYWIHWVRQAPGKGLEWVAGITPAGGYTYYADSVKGRFTISADTSKNTAYLQMNSLRAEDTAVYYCARFVFFLPYAMDYWGQGTLVTVSSGGGGSGGGGSGGGGSDIQMTQSPSSLSASVGDRVTITCRASQDVSTAVAWYQQKPGKAPKLLIYSASFLYSGVPSRFSGSGSGTDFTLTISSLQPEDFATYYCQQGYGNPFTFGQGTKVEIKRDYKDDDDK

SEQ ID NO: 22 - protein, 121 aa, Homo sapiens
  Plasminogen K5 domain
  SIGNAL (1)...(15): Signal sequence
MYRMQLLSCIALSLALVTNSPVVLLPDVETPSEEDCMFGNGKGYRGKRATTVTGTPCQDWAAQEPHRHSIFTPETNPRAGLEKNYCRNPDGDVGGPWCYTTNPRKLYDYCDVPQCAAPSFD

SEQ ID NO: 23 - protein, 264 aa, Homo sapiens
  Human tissue factor-alpha-v-beta-3-integrin RGD fusion protein
  SIGNAL (1)...(34): Signal sequence
METPAWPRVPRPETAVARTLLLGWVFAQVAGASGTTNTVAAYNLTWKSTNFKTILEWEPKPVNQVYTVQISTKSGDWKSKCFYTTDTECDLTDEIVKDVKQTYLARVFSYPAGNVESTGSAGEPLYENSPEFTPYLETNLGQPTIQSFEQVGTKVNVTVEDERTLVRRNNTFLSLRDVFGKDLIYTLYYWKSSSSGKKTAKTNTNEFLIDVDKGENYCFSVQAVIPSRTVNRKSTDSPVECMGQEKGEFRGRGDSPDYKDDDDK

SEQ ID NO: 24 - protein, 207 aa, Homo sapiens
  Interleuken-24 isoform 3 precursor protein NP_001172085.1
  SIGNAL (1)...(52): Signal sequence
MNFQQRLQSLWTLASRPFCPPLLATASQMQMVVLPCLGFTLLLWSQVSGAQGQEFHFGPCQVKGVVPQKLWEAFWAVKDTMQAQDNITSARLLQQEVLQNVSDAESCYLVHTLLEFYLKTVFKNYHNRTVEVRTLKSFSTLANNFVLIVSQLQPSQENEMFSIRDSAHRRFLLFRRAFKQLDVEAALTKALGEVDILLTWMQKFYKL

SEQ ID NO: 25 - protein, 520 aa, Homo sapiens
  SIL-6-SIL-6 receptor fusion protein
  SIGNAL (1)...(19): Signal sequence
MLAVGCALLAALLAAPGAALAPRRCPAQEVARGVLTSLPGDSVTLTCPGVEPEDNATVHWVLRKPAAGSHPSRWAGMGRRLLLRSVQLHDSGNYSCYRAGRPAGTVHLLVDVPPEEPQLSCFRKSPLSNVVCEWGPRSTPSLTTKAVLLVRKFQNSPAEDFQEPCQYSQESQKFSCQLAVPEGDSSFYIVSMCVASSVGSKFSKTQTFQGCGILQPDPPANITVTAVARNPRWLSVTWQDPHSWNSSFYRLRFELRYRAERSKTFTTWMVKDLQHHCVIHDAWSGLRHVVQLRAQEEFGQGEWSEWSPEAMGTPWTESRSPPARGGGGSGGGGSVEPVPPGEDSKDVAAPHRQPLTSSERIDKQIRYILDGISALRKETCNKSNMCESSKEALAENNLNLPKMAEKDGCFQSGFNEETCLVKIITGLLEFEVYLEYLQNRFESSEEQARAVQMSTKVLIQFLQKKAKNLDAITTPDPTTNASLLTKLQAQNQWLQDMTTHLILRSFKEFLQSSLRALRQM

SEQ ID NO: 26 - DNA, 8 bp, Artificial Sequence
  SbfI restriction site
cctgcagg

SEQ ID NO: 27 - DNA, 8 bp, Artificial Sequence
  NotI restriction site
gcggccgc

SEQ ID NO: 28 - DNA, 8 bp, Artificial Sequence
  SgrAI restriction site
crccggyg

SEQ ID NO: 29 - DNA, 6 bp, Artificial Sequence
  SmaI restriction site
cccggg

SEQ ID NO: 30 - DNA, 6 bp, Artificial Sequence
  TspMI restriction site
cccggg

SEQ ID NO: 31 - DNA, 6 bp, Artificial Sequence
  XmaI restriction site
cccggg

SEQ ID NO: 32 - DNA, 6 bp, Artificial Sequence
  ApaI restriction site
cccggg

SEQ ID NO: 33 - DNA, 6 bp, Artificial Sequence
  PspOMI restriction site
cccggg

SEQ ID NO: 34 - protein, 13 aa, Artificial Sequence
  Compstatin
ICVVQDWGHHRCT

SEQ ID NO: 35 - protein, 1676 aa, Artificial Sequence
  C5 (annotated alpha chain and beta chain)
  SIGNAL (1)...(18): Signal sequence
  CHAIN (19)...(673): Beta chain
  PROPEP (674)...(677): Propeptide
  CHAIN (678)...(1676): Alpha chain
MGLLGILCFLIFLGKTWGQEQTYVISAPKIFRVGASENIVIQVYGYTEAFDATISIKSYPDKKFSYSSGHVHLSSENKFQNSAILTIQPKQLPGGQNPVSYVYLEVVSKHFSKSKRMPITYDNGFLFIHTDKPVYTPDQSVKVRVYSLNDDLKPAKRETVLTFIDPEGSEVDMVEEIDHIGIISFPDFKIPSNPRYGMWTIKAKYKEDFSTTGTAYFEVKEYVLPHFSVSIEPEYNFIGYKNFKNFEITIKARYFYNKVVTEADVYITFGIREDLKDDQKEMMQTAMQNTMLINGIAQVTFDSETAVKELSYYSLEDLNNKYLYIAVTVIESTGGFSEEAEIPGIKYVLSPYKLNLVATPLFLKPGIPYPIKVQVKDSLDQLVGGVPVTLNAQTIDVNQETSDLDPSKSVTRVDDGVASFVLNLPSGVTVLEFNVKTDAPDLPEENQAREGYRAIAYSSLSQSYLYIDWTDNHKALLVGEHLNIIVTPKSPYIDKITHYNYLILSKGKIIHFGTREKFSDASYQSINIPVTQNMVPSSRLLVYYIVTGEQTAELVSDSVWLNIEEKCGNQLQVHLSPDADAYSPGQTVSLNMATGMDSWVALAAVDSAVYGVQRGAKKPLERVFQFLEKSDLGCGAGGGLNNANVFHLAGLTFLTNANADDSQENDEPCKEILRPRRTLQKKIEEIAAKYKHSVVKKCCYDGACVNNDETCEQRAARISLGPRCIKAFTECCVVASQLRANISHKDMQLGRLHMKTLLPVSKPEIRSYFPESWLWEVHLVPRRKQLQFALPDSLTTWEIQGVGISNTGICVADTVKAKVFKDVFLEMNIPYSVVRGEQIQLKGTVYNYRTSGMQFCVKMSAVEGICTSESPVIDHQGTKSSKCVRQKVEGSSSHLVTFTVLPLEIGLHNINFSLETWFGKEILVKTLRVVPEGVKRESYSGVTLDPRGIYGTISRRKEFPYRIPLDLVPKTEIKRILSVKGLLVGEILSAVLSQEGINILTHLPKGSAEAELMSVVPVFYVFHYLETGNHWNIFHSDPLIEKQKLKKKLKEGMLSIMSYRNADYSYSVWKGGSASTWLTAFALRVLGQVNKYVEQNQNSICNSLLWLVENYQLDNGSFKENSQYQPIKLQGTLPVEARENSLYLTAFTVIGIRKAFDICPLVKIDTALIKADNFLLENTLPAQSTFTLAISAYALSLGDKTHPQFRSIVSALKREALVKGNPPIYRFWKDNLQHKDSSVPNTGTARMVETTAYALLTSLNLKDINYVNPVIKWLSEEQRYGGGFYSTQDTINAIEGLTEYSLLVKQLRLSMDIDVSYKHKGALHNYKMTDKNFLGRPVEVLLNDDLIVSTGFGSGLATVHVTTVVHKTSTSEEVCSFYLKIDTQDIEASHYRGYGNSDYKRIVACASYKPSREESSSGSSHAVMDISLPTGISANEEDLKALVEGVDQLFTDYQIKDGHVILQLNSIPSSDFLCVRFRIFELFEVGFLSPATFTVYEYHRPDKQCTMFYSTSNIKIQKVCEGAACKCVEADCGQMQEELDLTISAETRKQTACKPEIAYAYKVSITSITVENVFVKYKATLLDIYKTGEAVAEKDSEITFIKKVTCTNAELVKGRQYLIMGKEALQIKYNFSFRYIYPLDSLTWIEYWPRDTTCSSCQAFLANLDEFAEDIFLNGC

SEQ ID NO: 36 - protein, 5 aa, Artificial Sequence
  Anti-C5 CDRH1
NYWIQ

SEQ ID NO: 37 - protein, 17 aa, Artificial Sequence
  Anti-C5 CDRH2
EILPGSGSTEYTENFKD

SEQ ID NO: 38 - protein, 13 aa, Artificial Sequence
  Anti-C5 CDRH3
YFFGSSPNWYFDV

SEQ ID NO: 39 - protein, 11 aa, Artificial Sequence
  Anti-C5 CDRL1
GASENIYGALN

SEQ ID NO: 40 - protein, 7 aa, Artificial Sequence
  Anti-C5 CDRL2
GATNLAD

SEQ ID NO: 41 - protein, 9 aa, Artificial Sequence
  Anti-C5 CDRL3
QNVLNTPLT

SEQ ID NO: 42 - protein, 123 aa, Artificial Sequence
  Anti-C5 variable heavy chain
QVQLVQSGAEVKKPGASVKVSCKASGYIFSNYWIQWVRQAPGQGLEWMGEILPGSGSTEYTENFKDRVTMTRDTSTSTVYMELSSLRSEDTAVYYCARYFFGSSPNWYFDVWGQGTLVTVSSA

SEQ ID NO: 43 - protein, 109 aa, Artificial Sequence
  Anti-C5 variable light chain
DIQMTQSPSSLSASVGDRVTITCGASENIYGALNWYQQKPGKAPKLLIYGATNLADGVPSRFSGSGSGTDFTLTISSLQPEDFATYYCQNVLNTPLTFGQGTKVEIKRT

SEQ ID NO: 44 - protein, 448 aa, Artificial Sequence
  Anti-C5 eculizumab heavy chain
QVQLVQSGAEVKKPGASVKVSCKASGYIFSNYWIQWVRQAPGQGLEWMGEILPGSGSTEYTENFKDRVTMTRDTSTSTVYMELSSLRSEDTAVYYCARYFFGSSPNWYFDVWGQGTLVTVSSASTKGPSVFPLAPCSRSTSESTAALGCLVKDYFPEPVTVSWNSGALTSGVHTFPAVLQSSGLYSLSSVVTVPSSNFGTQTYTCNVDHKPSNTKVDKTVERKCCVECPPCPAPPVAGPSVFLFPPKPKDTLMISRTPEVTCVVVDVSQEDPEVQFNWYVDGVEVHNAKTKPREEQFNSTYRVVSVLTVLHQDWLNGKEYKCKVSNKGLPSSIEKTISKAKGQPREPQVYTLPPSQEEMTKNQVSLTCLVKGFYPSDIAVEWESNGQPENNYKTTPPVLDSDGSFFLYSRLTVDKSRWQEGNVFSCSVMHEALHNHYTQKSLSLSLGK

SEQ ID NO: 45 - protein, 214 aa, Artificial Sequence [sequence omitted]

SEQ ID NO: 46 - protein, 246 aa, Artificial Sequence
  Anti-C5 pexelizumab
DIQMTQSPSSLSASVGDRVTITCGASENIYGALNWYQRKPGKAPKLLIYGATNLADGVPSRFSGSGSGTDFTLTISSLQPEDFATYYCQNVLNTPLTFGQGTKVEIKRTGGGGSGGGGSGGGGSQVQLVQSGAEVKPGASVKVSCKASGYIFSNYWIQWVRQAPGQGLEWMGEILPGSGSTEYTENFKDRVTMTRDTSTSTVYMELSSLRSEDTAVYYCARYFFGSSPNWYFDVWGQGTLVTVSSA

SEQ ID NO: 47 - protein, 246 aa, Artificial Sequence
  Anti-C5 pexelizumab R38Q
DIQMTQSPSSLSASVGDRVTITCGASENIYGALNWYQQKPGKAPKLLIYGATNLADGVPSRFSGSGSGTDFTLTISSLQPEDFATYYCQNVLNTPLTFGQGTKVEIKRTGGGGSGGGGSGGGGSQVQLVQSGAEVKPGASVKVSCKASGYIFSNYWIQWVRQAPGQGLEWMGEILPGSGSTEYTENFKDRVTMTRDTSTSTVYMELSSLRSEDTAVYYCARYFFGSSPNWYFDVWGQGTLVTVSSA

SEQ ID NO: 48 - protein, 21 aa, Artificial Sequence
  C5 epitope designated KSSKC epitope
VIDHQGTKSSKCVRQKVEGSS

SEQ ID NO: 49 - protein, 18 aa, Artificial Sequence
  C5 epitope
KDMQLGRLHMKTLLPVSK

SEQ ID NO: 50 - protein, 114 aa, Artificial Sequence
  Anti-C5 variable light chain
DIRMTQSPDSLAVSLGERATINCKSSQSVLYSSNNKNYLAWYQQKPGQPPKLLIYWASTRESGVPDRFSGSGSGTDFTLTISSLQAEDVAVYYCQQYYSTPQLTFGGRTKVDIK

SEQ ID NO: 51 - protein, 115 aa, Artificial Sequence
  Anti-C5 variable heavy chain
QVQLQQSEGGVVQPGRSLRLSCAASGFTFSSYGMNWVRQAPGKGLEWVSYISSSSSTIYYADSVKGRFTISRDNSKNTLYLQMNSLRAEDTAVYYCARGPGMDVWGQGTTVTVSS

SEQ ID NO: 52 - protein, 250 aa, Artificial Sequence
  Anti-C5 TSA12/22
DIRMTQSPDSLAVSLGERATINCKSSQSVLYSSNNKNYLAWYQQKPGQPPKLLIYWASTRESGVPDRFSGSGSGTDFTLTISSLQAEDVAVYYCQQYYSTPQLTFGGRTKVDIKSGGSTITSYNVYYTKLSSSGTQVQLQQSEGGVVQPGRSLRLSCAASGFTFSSYGMNWVRQAPGKGLEWVSYISSSSSTIYYADSVKGRFTISRDNSKNTLYLQMNSLRAEDTAVYYCARGPGMDVWGQGTTVTVSS
